(19) United States
(12) Patent Application Publication
(10) Pub. No.: US 2024/0336922 A1
(43) Pub. Date: Oct. 10, 2024

(54) INHIBITORS OF EXPRESSION AND/OR FUNCTION

(71) Applicant: E-Therapeutics PLC, London (GB)

(72) Inventors: Alan Victor WHITMORE, London (GB); Julie BORGEL, London (GB); Amy MCCARTHY, London (GB); Graham CRAGGS, London (GB); James LONGDEN, London (GB); Ines DE SANTIAGO, London (GB); Duncan BROWN, London (GB); Ahmad Ali MORTAZAVI, London (GB); Viviana MANNELLA, London (GB); Muthusamy JAYARAMAN, London (GB); Alexandre DEBACKER, London (GB); Adrian MOGG, London (GB)

(21) Appl. No.: 18/640,905

(22) Filed: Apr. 19, 2024

Related U.S. Application Data
(63) Continuation of application No. PCT/EP2023/064762, filed on Jun. 1, 2023.
(60) Provisional application No. 63/369,627, filed on Jul. 27, 2022.

(30) Foreign Application Priority Data
Jun. 1, 2022 (GB) 2208124.4
Feb. 6, 2023 (EP) 23155118.5

(51) Int. Cl. C12N 15/113

(52) U.S. Cl. CPC C12N 15/1137; C12N 2310/14; C12N 2310/322; C12N 2310/351

(57) ABSTRACT

The present invention relates to inhibitors, and compositions containing inhibitors, and uses of the same in the treatment or prevention of diabetes.

### CROSS REFERENCE TO RELATED APPLICATIONS

[0001] This application is Continuation of International Application No. PCT/EP2023/064762, filed internationally on Jun. 1, 2023, which claims the priority benefit of European Application No. 2208124.4, filed on Jun. 1, 2022, U.S. Provisional Patent Application No. 63/369,627, filed on Jul. 27, 2022, and European Application No. 23155118.5, filed on Feb. 6, 2023, the contents of each of which are incorporated herein by reference in their entirety.

### REFERENCE TO AN ELECTRONIC SEQUENCE LISTING

[0002] The contents of the electronic sequence listing (228792001001SUBSEQLIST.xml; Size: 3,877,274 bytes; and Date of Creation: May 22, 2024) is herein incorporated by reference in its entirety.

### FIELD

[0003] The present invention provides inhibitors, such as nucleic acid compounds, such as siRNA, suitable for therapeutic use. Additionally, the present invention provides methods of making these compounds, as well as methods of using such compounds for the treatment of various diseases and condition.

### BACKGROUND OF THE INVENTION

[0004] Inhibitors, such as oligonucleoside/oligonucleotide compounds which are inhibitors of gene expression and/or expression or function of other targets such as LNCRNAs, can have important therapeutic applications in medicine. Oligonucleotides/oligonucleosides can be used to silence genes that are responsible for a particular disease. Gene-silencing prevents formation of a protein by inhibiting translation. Importantly, gene-silencing agents are a promising alternative to traditional small, organic compounds that inhibit the function of the protein linked to the disease. siRNA, antisense RNA, and micro-RNA are oligonucleoside/oligonucleotides that prevent the formation of proteins by gene-silencing.

[0005] A number of modified siRNA compounds in particular have been developed in the last two decades for diagnostic and therapeutic purposes, including siRNA/RNAi therapeutic agents for the treatment of various diseases including central-nervous-system diseases, inflammatory diseases, metabolic disorders, oncology, infectious diseases, and ocular diseases.

[0006] The present invention relates to inhibitors, such as oligomers e.g. nucleic acids, e.g. oligonucleoside/oligonucleotide compounds, and their use in the treatment and/or prevention of disease.

[0007] In particular, suitable inhibitors are still needed to help in the prevention and or treatment of diseases such as type 2 diabetes.

[0008] A mutation in the B4GALT1 gene resulting in a serine at the position corresponding to position 352 of the full length/mature B4GALT1 polypeptide has been identified as being associated with a reduced risk of coronary artery disease (see WO2018226560, and Montasser et al., Science 374, 1221-1227 (2021) 3 Dec. 2021). The use of an siRNA that hybridizes to a sequence within the endogenous B4GALT1 gene and decreases expression of B4GALT1 polypeptide in a cell in a subject has been proposed as a means to treat a subject with, or susceptible to, developing cardiovascular conditions.

### STATEMENTS OF INVENTION

[0009] The invention is defined as in the claims and relates to, inter alia:

[0010] In one aspect, the invention relates to an inhibitor of post-translational glycosylation, such as an inhibitor of expression and/or function of B4GALT1, wherein said inhibitor is conjugated to one or more ligand moieties.

[0011] In a further aspect, the invention relates to an inhibitor according to the invention, wherein said inhibitor comprises an siRNA oligomer conjugated to one or more ligand moieties.

[0012] In a further aspect, the invention relates to an inhibitor according to the invention, wherein said one or more ligand moieties comprise one or more GalNAc ligands.

[0013] In a further aspect, the invention relates to an inhibitor according to the invention, wherein said one or more ligand moieties comprise one more GalNAc ligand derivatives.

[0014] In another aspect, the invention relates to an inhibitor of post-translational glycosylation for use in the treatment of diabetes, such as an inhibitor of expression and/or function of B4GALT1.

[0015] In another aspect, the invention relates to an inhibitor of expression and/or function of B4GALT1 for use in the treatment of diabetes.

[0016] In a further aspect, the invention relates to an inhibitor for use according to the invention, which is an siRNA oligomer, typically conjugated to one or more ligand moieties.

[0017] In a further aspect, the invention relates to an inhibitor for use according to the invention, wherein said one or more ligand moieties comprise one or more GalNAc ligands, and/or one or more GalNAc ligand derivatives.

[0018] In a further aspect, the invention relates to an inhibitor or an inhibitor for use according to the invention, wherein the target of the inhibitor is selected from B4GALT1.

[0019] In a further aspect, the invention relates to an inhibitor or an inhibitor for use according to the invention, which is an siRNA oligomer having a first and a second strand wherein:
[0020] i) the first strand of the siRNA has a length in the range of 15 to 30 nucleosides, preferably 19 to 25 nucleosides, more preferably 23 or 25; even more preferably 23; and/or
[0021] ii) the second strand of the siRNA has a length in the range of 15 to 30 nucleosides, preferably 19 to 25 nucleosides, more preferably 21 nucleosides.

[0022] In a further aspect, the invention relates to an inhibitor or an inhibitor for use according to the invention, wherein the second sense strand further comprises one or more abasic nucleosides in a terminal region of the second strand, and wherein said abasic nucleoside(s) is/are connected to an adjacent nucleoside through a reversed internucleoside linkage.

[0023] In a further aspect, the invention relates to an inhibitor or an inhibitor for use according to the invention, wherein the second strand comprises:
[0024] i 2, or more than 2, abasic nucleosides in a terminal region of the second strand; and/or
[0025] ii 2, or more than 2, abasic nucleosides in either the 5′ or 3′ terminal region of the second strand; and/or
[0026] iii 2, or more than 2, abasic nucleosides in either the 5′ or 3′ terminal region of the second strand, wherein the abasic nucleosides are present in an overhang as herein described; and/or
[0027] iv 2, or more than 2, consecutive abasic nucleosides in a terminal region of the second strand, wherein preferably one such abasic nucleoside is a terminal nucleoside; and/or
[0028] v 2, or more than 2, consecutive abasic nucleosides in either the 5′ or 3′ terminal region of the second strand, wherein preferably one such abasic nucleoside is a terminal nucleoside in either the 5′ or 3′ terminal region of the second strand; and/or
[0029] vi a reversed internucleoside linkage connects at least one abasic nucleoside to an adjacent basic nucleoside in a terminal region of the second strand; and/or
[0030] vii a reversed internucleoside linkage connects at least one abasic nucleoside to an adjacent basic nucleoside in either the 5′ or 3′ terminal region of the second strand; and/or
[0031] viii an abasic nucleoside as the penultimate nucleoside which is connected via the reversed linkage to the nucleoside which is not the terminal nucleoside (called the antepenultimate nucleoside herein); and/or
[0032] ix abasic nucleosides as the 2 terminal nucleosides connected via a 5′-3′ linkage when reading the strand in the direction towards that terminus;
[0033] x abasic nucleosides as the 2 terminal nucleosides connected via a 3′-5′ linkage when reading the strand in the direction towards the terminus comprising the terminal nucleosides;
[0034] xi abasic nucleosides as the terminal 2 positions, wherein the penultimate nucleoside is connected via the reversed linkage to the antepenultimate nucleoside, and wherein the reversed linkage is a 5-5′ reversed linkage or a 3′-3′ reversed linkage;
[0035] xii abasic nucleosides as the terminal 2 positions, wherein the penultimate nucleoside is connected via the reversed linkage to the antepenultimate nucleoside, and wherein either
[0036] (1) the reversed linkage is a 5-5′ reversed linkage and the linkage between the terminal and penultimate abasic nucleosides is 3′5′ when reading towards the terminus comprising the terminal and penultimate abasic nucleosides; or
[0037] (2) the reversed linkage is a 3-3′ reversed linkage and the linkage between the terminal and penultimate abasic nucleosides is 5′3′ when reading towards the terminus comprising the terminal and penultimate abasic nucleosides.

[0038] In a further aspect, the invention relates to an inhibitor or an inhibitor for use according to the invention, wherein the reversed internucleoside linkage is at a terminal region which is distal to the 5′ terminal region of the second strand, or at a terminal region which is distal to the 3′ terminal region of the second strand.

[0039] In a further aspect, the invention relates to an inhibitor or an inhibitor for use according to the invention, wherein the reversed internucleoside linkage is a 3′3 reversed linkage.

[0040] In a further aspect, the invention relates to an inhibitor or an inhibitor for use according to the invention, wherein the reversed internucleoside linkage is a 5′5 reversed linkage.

[0041] In a further aspect, the invention relates to an inhibitor or an inhibitor for use according to the invention, wherein one or more nucleosides on the first strand and/or the second strand is/are modified, to form modified nucleosides.

[0042] In a further aspect, the invention relates to an inhibitor or an inhibitor for use according to the invention, wherein the modification is a modification at the 2′-OH group of the ribose sugar, optionally selected from 2′-Me or 2′-F modifications.

[0043] In a further aspect, the invention relates to an inhibitor or an inhibitor for use according to the invention, wherein the first strand comprises a 2′-F at any of position 14, position 2, position 6, or any combination thereof, counting from position 1 of said first strand.

[0044] In a further aspect, the invention relates to an inhibitor or an inhibitor for use according to the invention, wherein the second strand comprises a 2′-F modification at position 7 and/or 9, and/or 11 and/or 13, counting from position 1 of said second strand.

[0045] In a further aspect, the invention relates to an inhibitor or an inhibitor for use according to the invention, wherein the first and second strand each comprise 2′-Me and 2′-F modifications.

[0046] In a further aspect, the invention relates to an inhibitor or an inhibitor for use according to the invention, which is an siRNA, wherein the siRNA comprises at least one thermally destabilizing modification, suitably at one or more of positions 1 to 9 of the first strand counting from position 1 of the first strand, and/or at one or more of positions on the second strand aligned with positions 1 to 9 of the first strand, wherein the destabilizing modification is selected from a modified unlocked nucleic acid (UNA) and a glycol nucleic acid (GNA), preferably a glycol nucleic acid.

[0047] In a further aspect, the invention relates to an inhibitor or an inhibitor for use according to the invention, wherein the siRNA comprises at least one thermally destabilizing modification at position 7 of the first strand, counting from position 1 of the first strand.

[0048] In a further aspect, the invention relates to an inhibitor or an inhibitor for use according to the invention, which is an siRNA, wherein the siRNA comprises 3 or more 2′-F modifications at positions 7 to 13 of the second strand, such as 4, 5, 6 or 7 2′-F modifications at positions 7 to 13 of the second strand, counting from position 1 of said second strand.

[0049] In a further aspect, the invention relates to an inhibitor or an inhibitor for use according to the invention, which is an siRNA, wherein said second strand comprises at least 3, such as 4, 5 or 6, 2′-Me modifications at positions 1 to 6 of the second strand, counting from position 1 of said second strand.

[0050] In a further aspect, the invention relates to an inhibitor or an inhibitor for use according to the invention, which is an siRNA, wherein said first strand comprises at least 5 2′-Me consecutive modifications at the 3′ terminal region, preferably including the terminal nucleoside at the 3′ terminal region, or at least within 1 or 2 nucleosides from the terminal nucleoside at the 3′ terminal region.

[0051] In a further aspect, the invention relates to an inhibitor or an inhibitor for use according to the invention, which is an siRNA wherein said first strand comprises 7 2′-Me consecutive modifications at the 3′ terminal region, preferably including the terminal nucleoside at the 3′ terminal region.

[0052] In a further aspect, the invention relates to an inhibitor or an inhibitor for use according to the invention, wherein the siRNA oligomer further comprises one or more phosphorothioate internucleoside linkages.

[0053] In a further aspect, the invention relates to an inhibitor or an inhibitor for use according to the invention, wherein said one or more phosphorothioate internucleoside linkages are respectively between at least three consecutive positions in a 5′ or 3′ near terminal region of the second strand, whereby said near terminal region is preferably adjacent said terminal region wherein said one or more abasic nucleosides of said second strand is/are located as defined herein.

[0054] In a further aspect, the invention relates to an inhibitor or an inhibitor for use according to the invention, wherein said one or more phosphorothioate internucleoside linkages are respectively between at least three consecutive positions in a 5′ and/or 3′ terminal region of the first strand, whereby preferably a terminal position at the 5′ and/or 3′ terminal region of said first strand is attached to its adjacent position by a phosphorothioate internucleoside linkage.

[0055] In a further aspect, the invention relates to an inhibitor or an inhibitor for use according to the invention, wherein the oligomer is an siRNA and the second strand of the siRNA is conjugated directly or indirectly to one or more ligand moiety(s), wherein said ligand moiety is typically present at a terminal region of the second strand, preferably at the 3′ terminal region thereof.

[0056] In a further aspect, the invention relates to an inhibitor or an inhibitor for use according to the invention, wherein the ligand moiety comprises
[0057] i) one or more GalNAc ligands; and/or
[0058] ii) one or more GalNAc ligand derivatives; and/or
[0059] iii) one or more GalNAc ligands and/or GalNAc ligand derivatives conjugated to said SiRNA through a linker.

[0060] In a further aspect, the invention relates to an inhibitor or an inhibitor for use according to the invention, wherein said one or more GalNAc ligands and/or GalNAc ligand derivatives are conjugated directly or indirectly to the 5′ or 3′ terminal region of the second strand of the siRNA oligomer, preferably at the 3′ terminal region thereof.

[0061] In a further aspect, the invention relates to an inhibitor or an inhibitor for use according to the invention, wherein the ligand moiety comprises

[chemical structure]

[0062] In a further aspect, the invention relates to an inhibitor or an inhibitor for use according to the invention, having the structure:

[chemical structure]

[0063] wherein:
[0064] R₁ at each occurrence is independently selected from the group consisting of hydrogen, methyl and ethyl;
[0065] R₂ is selected from the group consisting of hydrogen, hydroxy, —OC₁₋₃alkyl, —C(═O) OC₁₋₃alkyl, halo and nitro;
[0066] X₁ and X₂ at each occurrence are independently selected from the group consisting of methylene, oxygen and sulfur;
[0067] m is an integer of from 1 to 6;
[0068] n is an integer of from 1 to 10;
[0069] q, r, s, t, v are independently integers from 0 to 4, with the proviso that:
[0070] (i) q and r cannot both be 0 at the same time; and
[0071] (ii) s, t and v cannot all be 0 at the same time;
[0072] Z is an oligomer

[0073] In a further aspect, the invention relates to an inhibitor or an inhibitor for use according to the invention, having the structure

[chemical structure]

[0074] wherein:
[0075] r and s are independently an integer selected from 1 to 16; and
[0076] Z is an oligomer.

[0077] In a further aspect, the invention relates to an inhibitor or an inhibitor for use according to the invention, formulated as a pharmaceutical composition with an excipient and/or carrier.

[0078] In another aspect, the invention relates to a pharmaceutical composition comprising an inhibitor according to the invention, in combination with a pharmaceutically acceptable excipient or carrier.

[0079] In a further aspect, the invention relates to a pharmaceutical composition comprising an inhibitor according to the invention, in combination with a pharmaceutically acceptable excipient or carrier, for use in the treatment of diabetes.

[0080] In another aspect, the invention relates to a use of B4GALT1 as a target for identifying one or more therapeutic agents for the treatment of diabetes.

[0081] In another aspect, the invention relates to a method of treating or preventing diabetes, which comprises administering to a patient an inhibitor of post-translational glycosylation, such as an inhibitor of B4GALT1 such as an inhibitor as defined according to the invention.

[0082] In another aspect, the invention relates to B4GALT1 for use as a biomarker of diabetes.

[0083] In another aspect, the invention relates to B4GALT1 for use in an in vivo method of predicting susceptibility to diabetes, typically by monitoring the sequence and/or level of expression and/or function of B4GALT1 in a sample obtained from a patient.

[0084] In another aspect, the invention relates to a method of predicting susceptibility to diabetes, and optionally treating diabetes, in a patient, said method comprising:
[0085] (a) obtaining a sample from the patient,
[0086] (b) detecting the sequence and/or expression and/or function of B4GALT1 in said sample obtained from the patient,
[0087] (c) predicting susceptibility to diabetes, based on the sequence and/or expression and/or function of B4GALT1 in said sample obtained from the patient,
[0088] (d) preferably administering to the diagnosed patient an effective amount of an inhibitor of B4GALT1.

[0089] In another aspect, the invention relates to a use of an inhibitor, or composition, according to the invention, in the preparation of a medicament for use in the treatment of diabetes.

### FIGURES

[0090] FIG. 1A shows an exemplary linear configuration for a conjugate.

[0091] FIG. 1B shows an exemplary branched configuration for a conjugate.

[0092] FIGS. 2-5 show preferred oligomer-linker-ligand constructs of the invention.

[0093] FIG. 6 shows the detail of the formulae described in Sentences 1-101 disclosed herein.

[0094] FIG. 7 shows the detail of formulae described in Clauses 1-56 disclosed herein.

[0095] FIG. 8 shows a two-dimensional representation of the network-enriched pathways. Each pathway is represented by a point and the proximity of the points is a measure of the similarity of the pathways. Pathways sharing common proteins and/or neighbors are closer together—they cluster into higher order processes. The “network” relationship between pathways is used to identify common biological themes. This provides the basis for further analysis to create focused network models of key biology.

[0096] FIG. 9 is a summary diagram showing on top the analysis carried out by the meta-analysis authors and on the bottom the further analysis carried out by the inventors. The 9 ‘seed’ sets used for network construction on the right were derived from the categories of gene sets on the top.

[0097] FIG. 10 illustrates the increased sensitivity of the network aware approach in identifying relevant biological processes—the data analysed using the inventor's approach is shown across 3 different network construction techniques—the inventors were able to resolve known processes in type 2 diabetes risk. A similar analysis yielded the novel risk-associated glycosylation process on which the inventors focused.

[0098] FIG. 11 is an illustration of the network model built with 3 key proteins highlighted by the inventor's analytics.

[0099] FIG. 12 shows a selection of active GalNAc-siRNAs with EC50 values less than 100 nM. Dose-response in B4GALT1 gene knockdown in primary mouse hepatocytes was measured after 48 hr incubation with GalNAc-siRNAs targeting mouse B4GALT1 at 10 serial dilutions from 1000 nM. EC₅₀ values were determined by fitting data to a 4-parameter sigmoidal dose-response (variable slope) equation using GraphPad Prism. 4 active GalNAc-siRNAs, ETXM619, ETXM624, ETXM628 and ETXM633, were selected for in vivo pharmacology.

[0100] FIG. 13 is a summary of B4GALT1 mRNA knockdown effects of multiple dosing of GalNAc-siRNAs, ETXM619, ETXM624, ETXM628 and ETXM633 (10 mg/kg) in mouse liver tissues. The y-axis values are the relative mRNA expression to the non-treated group (n=5). Each data point represents the relative mRNA expression as Mean±SD from n=3 experiment. Red arrows on the top of the graph indicate the days test articles were administered.

[0101] FIG. 14 shows the effect of B4GALT1 mRNA knockdown in plasma LDL-c, glucose and fibrinogen levels. Plasma samples were collected on day 14 after three dosings of ETXMs (10 mg/kg, s.c.) on day 0, day 3 and day 7. Compared to the non-treated group (n=5), the ETXM treated group (n=12) shows significantly reduced levels of LDL-c, glucose and fibrinogen in normal C57BL/6 mice. Data presented here are Mean±SD.

### DETAILED DESCRIPTION

[0102] The present invention provides, inter alia, inhibitors, for example oligomers such as nucleic acids, such as inhibitory RNA molecules (which may be referred to as iRNA or siRNA), and compositions containing the same which can affect expression of a target, for example by binding to mRNA transcribed from a gene, or by inhibiting the function of nucleic acids such as long non-coding RNAs (herein “LNCRNA”). The target may be within a cell, e.g. a cell within a subject, such as a human. The inhibitors can be used to prevent and/or treat medical conditions associated with the e.g. the expression of a target gene or presence/activity of a nucleic acid in a cell e.g. such as a long non-coding RNA.

[0103] In particular, the present invention identifies inhibitors of post translational glycosylation, such as an inhibitor of B4GALT1, as useful in the prevention and/or treatment of diabetes.

[0104] B4GALT1 is Beta-1,4-galactosyltransferase 1, an enzyme that in humans is encoded by the B4GALT1 gene (SEQ ID NO: 1).

Genomic DNA sequence comprising the B4GALT1 gene (SEQ ID NO: 1):
GAGGCATGAAGAAATAATTGTGCATGACTGAGGACTTTCCAGACCTCCCCTTTCC
TTCCACCAGTTACTTACTAATCTCAGAATCCACCCCCCAAAATTTTTCTGATAAAAACACTAC
CTTAAAGCCAGCCCAGGGAGACTTGAGCCAGCCCAGGGAGACCTAAAGTCACCACAGGGAG
ATTTCAGCTGGACTCTTCTATCTCCTTGTTGGCCTACCTGCAGTACAAAGCTTTTCTTTTCTCA
AAAACCAGGTGTCACAGTATTGGTTTCTAGAACATTGGGCAGTGAGTGCTTTTGCGCTTTGG
TCGGTAACACCTGGATCTGATTTAGACAATACTTTGGACCTGAAGTCTTAATTAGTTGAACTT
TTGGGGGATTTTAAGAAGACACTAATGTATTTTACCTGTGAGAAGAATCTAAATAATCTGTG
GCCATTGGGCAAACTACTGTGGAATAAAGGTGCCTGACAATTCTTTGTCCCTCCTCCCATCA
AGAGGTGGAGTCAGCCAGGTGAAATGGCTCATGCTGGTAATCTCAGCACTTTGGGAGGCCA
AAGCAGGAAGACTGCGTGAGCTCAGGAGTTCGAGACTAGCCTGAGCAATATCGCAACATCT
CATCTCTACTAAAAATTTTAAAATTAGCTGGACGTGGAGGCGCATCCCGGTAGTCCCAGCTA
CTCGGGAGGCTGAGGCAGGAGAATCACTTGAGCCCAGGAGTTTGACGTTATAGTGACCTAT
GATCACACCACTGCACTACAGGCTGGTTGATAAAGGAAGATCCTGTCTAAAAAAAAAAGTA
AAAACAAGAGGCCGAGCCAGTTTTATTCCCCTTGAATCTGGCCTGCCCTATAAACTTGTTTTA
AGCAAAAGAATGCTTTAGAAGTGATGCTAAGGCTGGGCTTTCAGGGATCTCCATCTTCTGTA
TTTTTGAAATGCTCCTTTTTGGAATGCTTCCTCTAGTTTGTGAGGAAACCCAAGCAGCCACAT
GGAGAGTCCTTTGTGGAGAGATCCAAGTGGAGAATGAAGGCCCCATGACCCAACCCATTCT
GAGTTTCCAGCCCCCAGACAGCCCCAACTGCCATTCACATGAGTGAAGCCATTTTGGAACTT
CCAACTGTGCCAGTGCCTCAGCTGACACCATGTGAGGCAAAGCTGCCCAGCCAACTGCAAA
ACTGCGAGAAATTGTTGCTTCAAAACAGTAAGTTTTGGGGTAGGTGTTACGCTGCAATAGAT
GACTGAAATAACTGTCTACCATGTGCCGGGCACTATTTGATGCCCTTCTGATCCATGAGGGT
AAAAACAGAAATGTAACCTGGCAGGTGCAGAAGAGGGCGCCATAGGAGGGCAGAGGAAGG
CCAGCTGCAGGGAGAAGCAGGGAGCTGGTGATTCTGGGCAGATGAGCACATGGATGGGCCA
ACGGCCAAGCCCCCATGCCAGCTTTTGGCCAATCAGCACTGCAACTTCCTCCTGCATTTGTCT
CGCCGGATGGGATTAATTTTTCACCTGACGAAGTAGAGAGTGGAAAAGAGCTGGAGACAGT
GGGGAGAAAGGTTGCCTGGGTCTGTCTCACTAGCACCAGTTAATGTCTGGACTGCTGGACAA
TGTTGTCCCAAAGGTTTCTGGGCCATCTGTATTATTTGTAATTGACTGCTTCTAGGTGCCTGT
GGATCAGGGGCAGCTGAGACTAGTGCTCAGGCCTCAGTGGACTCTGCAAGTTCCTGAGGGA
TAGGCAATCAGCAAGTGTTGTTCCTTTTCCTCGATTTCTGGCCACGTGTGTCCTGGGACAGGT
CTGTGATTCTTAATAACCCCCGCAGTCCTGTCTCCTGGCTATCATCTATACCAATGGAAGACA
CATCCCCATTTCCCCCTCCACTTAATTTTCAGTTGCAGGACTAATCTGACCCACCCTCACTCA
TTGGCCAGGCCGACTTTACCCCTAGACACAGGATGCTGGGGTCAGCTTCACCTTTACCAACT
CCTTGGAGAACTCCACTTTACGTTCTAAACTAAGTTAGCAATAATTTTTCCCTTCTCTCCTTCC
CACATCATTAAGATGATCACAGTATTTAAAAAGTATTTTAACAAATATCGGCCGGGCACGGT
GGCTCACAACTGTAATCCCAGCACTTTGGGAGGCCGAGGCAGGCAGATCACGAGGTCAAAA
GATTGAGACCATTCTGGATAACACGGTGAAACCCCATCTCTACTAAAAATACAAACAAATTA
GCCGGGCATGGTGGCAGGCACCTGTAGTCCCAGCTACTTGGGAGGCTGAGGCAGGAGAATG
GCGTGAACCCAGGAGGCAGAGCTTGCAGTGAGCCAAGATCACGCCACTGCACTCCAGCCTG
GGTGACAGAGTGAGACTCCGTCTCAAAAAAAAAAAAAAAAAAATCTAGGGGCTGAAGATA
CAGTAGTGAACAAGAGAGAAATTTCCTGTTCTCATGAAGCTGATTTTCTAATGAGGGAGGCA
AGACAACAGAAAATAAATGCATAATGTTGGGTAGTTGATATCCACTCTGAAAAAAATCAAG
CAGGTTAAGGCCGGGCGCGGTGGCTCACGCCTGTAATCCCAGCACTTTGGGAGGCCGAGGC
GGGCGGATCACCTGAGGTCAGGAGTTTGAAACCAGCCTGGCCAACATGGTGAAATCCGTCT
CTACTAAAAACACAAAAAATTAGCCCGGCGTGATGGCAGGCACCTGTAATCCCAGCTACTC
AAGAGGCTGAGGCAGGAGAATCGCTTGAACCCGGGAGGCAGAGGTTGCAGTGAGGTGAGA
TTGCACCATTGCACTCCAACCTGGGGGACAAAAGCAAGACTTTGTCTCAAAAAAAAAAAAA
AAAAAATTCAAGCAGTTTAAGCAGATTTGGGCAGGAGGCCATTCTGCATAAGGTAGTCTGA
AAAGGTCTCTGTCATAAGGTGACATTTAAGAGACCTGAATTGAATGAAATATTGGGGACAA
GTGTTTCAGGCTAAATGAACAGCAAGTACAAAGGCCCTGAGGCAGGAAGAAATATGGCAAG
TTCAAGGAATAGCTATCAGGCTAGTGTGGCTAAGGCAGGTCCAGCATGGTAGAGTGACAGA
TGTGGGTGGGGAGGGAAATAGGAACCAGATTGAACAGGGTTTCTGTGGATTTGGTTCTGAA
CAAAATGGCATGATCTGATTTATGCTTACAAAGATTTCCTGGATGCTCTGTGGAAAACAGAC
TAGGGAGGAGGAATGGAGGAGGTGGAAGCAGGGTGACCAATTAGTAGCTGCCATATAACCC
AGGGCAAGATGATGGTGGCTTGATCGAGGATGGTTACATCAGAGTTGGCTGGTGGTGAATTT
TGATGTTTTGAAGGTAGCACTGACAAAGCTGGCTGAGGGCTTGCAAATGGCATTGAGAGCA
AGAGAAGCACATCAAGGACACCTTTTAGATTCTGGGGAACTGAATAAACAATAGTATCACT
CTCTGAGGGAGGTAAGAACGGGAGTGGTGTGTAAGGAGTAGGTTGCTGAGGGCAAGATGTA
TTGTGTTTGAGATGCCAGTAAAATAAGCAGTTGAATCTGGAGGTCAGGGAAGAGATCTGGG
CTGGAGACAAATCAGTGATCAGCATTTGGATATTATAAATCATTCCGAGGCAGTAAGTGTAG
ACACAAAAGAACATCATGGACTATGGCTGGGGCCTTCAGCAACTGGGGAAGAAGTCCAGAG
AGGAGACAGAAATGGCCAGTGAAGTGAGGAAGATCAGAAGGACCTGGTGTCCAGGAAGTC
AAGTGAGGAAAGTTGATTCTGTATGATCACAACCAAAGTGTCAACTCATAAGCCTTATTTTC
TCATCTGTGAAATGGACACCGTAACACCACCTACTTCATGGCAGATAGTACTGGCACACAGC
AAACTCTCAAAATAAGGTAGCTACTGTTATTCCCTGATGGTTGGCTGCCAGAGCCCTCAACT
TCCCTATCCACATTACTGACAGCACCTCCATGAGTCTTTCTCTGGGGTGAGGTGTCTCTGCTC
ACTCAGGGCCTGAGGCCTCTGGGTCAAATCGAGGTCAAGTGGCTTCAGTGCCTAAGTCTCTC
ACCCACACAGCCTTCAGCCCTTACTTGCAAATCAACAAAGGGTAAACCTGTAGAAAACATG
GGTTTCGGAGCCAGAATTCTGCCTCTTGCCAGCTGTGGGCTCTTAGGAAAGTTTCTTAATCTG
CCGGGGCCCCACTCTACGACATGGGGAGAACTGCTACTTCATGGGACAGTGGGTAGCCCAG
TGTAGACTGTAACGCCGGCTGATCTCCTGCACGCTGGCCTGGGAGTTAGAGGCTTCTTGCTG
CTCTCCTCTTCAAAGTATACAGGACTCCCGCCACACACACATCTGGAACCAAGCTGGTCTGA
GAGCCCCTTATAGCCCAGGCTACCTGATGGGGAGGCACAGAAGTGGCAACCCGTCCACTTTC
TTTGCCGCAGGACCCCCCGTTAAGCAGCGGGGTCCAGCCGGGCTGAGTTAGGGAGGGGGTT
TCGAACGTGCCACTCCTCGCCCGGCGTCGAAGCCCGTTTCCTGGGTAACCTTTTTCTGCCTCT
CTTCCTAGCCCACCAAGGCCCACTGGCCAGAACGCCGCCGCGGCCCCAAACCACTCCAGATA
ACCACCCGCCAGCTGTCCTCTCCGTTCTCTCCGCCGCCGCGCTGCAGGCCCAGGCTCGCACC
CGAGTCCCTTCGCACCCCAGGAAGTGGCGCGGCCTGTCGAGGGCAGCGTGGAGGAGGAAGA
GGAGGCGCGGCTCAACGCGACCGAAGCTCCGCCGCAAAGGCTCGGGAGGAAGAGGGCGGT
GCGCGGCCAAGCGTCGGAGCTGCAGTCATACTCCGGGGACCCCACGACGGCGCCCCGCCCG
CTGCCCACCCTCCCGAGGCCCCGCCCAGCGCGCCCATCCCGCCACGGGCTGCCCCGCCTTCC
CGCCCTCGTCCAGAAAACCCCGCGCCCGGCCCCGCCCCCGCCTTCGCCGGGGCCCCGCCCCT
CCCCTCTCCGCCGGCGCCTCGGGCGGCTTCTCGCCGCTCCCAGGTCTGGCTGGCTGGAGGAG
TCTCAGCTCTCAGCCGCTCGCCCGCCCCCGCTCCGGGCCCTCCCCTAGTCGCCGCTGTGGGGC
AGCGCCTGGCGGGCGGCCCGCGGGCGGGTCGCCTCCCCTCCTGTAGCCCACACCCTTCTTAA
AGCGGCGGCGGGAAGATGAGGCTTCGGGAGCCGCTCCTGAGCGGCAGCGCCGCGATGCCAG
GCGCGTCCCTACAGCGGGCCTGCCGCCTGCTCGTGGCCGTCTGCGCTCTGCACCTTGGCGTC
ACCCTCGTTTACTACCTGGCTGGCCGCGACCTGAGCCGCCTGCCCCAACTGGTCGGAGTCTC
CACACCGCTGCAGGGCGGCTCGAACAGTGCCGCCGCCATCGGGCAGTCCTCCGGGGAGCTC
CGGACCGGAGGGGCCCGGCCGCCGCCTCCTCTAGGCGCCTCCTCCCAGCCGCGCCCGGGTGG
CGACTCCAGCCCAGTCGTGGATTCTGGCCCTGGCCCCGCTAGCAACTTGACCTCGGTCCCAG
TGCCCCACACCACCGCACTGTCGCTGCCCGCCTGCCCTGAGGAGTCCCCGCTGCTTGGTAAG
GACTCGGGTCGGCGCCAGTCGGAGGATTGGGACCCCCCCGGATTTCCCCGACAGGGTCCCCC
AGACATTCCCTCAGGCTGGCTCTTCTACGACAGCCAGCCTCCCTCTTCTGGATCAGAGTTTTA
AATCCCAGACAGAGGCTTGGGACTGGATGGGAGAGAAGGTTTGCGAGGTGGGTCCCTGGGG
AGTCCTGTTGGAGGCGTGGGGCCGGGACCGCACAGGGAAGTCCCGAGGCCCCTCTAGCCCC
AGAACCAGAGAAGGCCTTGGAGACTTCCCTGCTGTGGCCCGAGGCTCAGGAAGTTTTGGAG
TTTGGGTCTGCTTAGGGCTTCGAGCAGCCTTGCACTGAGAACTCTGGTAGGGACCTCGAGTA
ATCCACTCCCTTTTGGGGACTGACGTGAGGCTCCCGGTGGGGAAGGAGACTGACCTCTCGGT
TCACGTGTCTTGCCATAGAGCCACTCTCCTGAGTGGGTTTTTCTCCTGATCGTTTGGGCCAAG
TGACTTCTCTCTGAACCTCATATTTCTCTTCTGGGATAATAAATGGTCACCCTTTCAAGGGGT
TGTTTTGGAAGATATTGTGAACAATGGTAAATAAGGGCTTAATTAATGAGGGTAAGCCCTCA
GTAAATTGTCACTGTGTGTTCATTTCTTCCTCTGTGTGGATCGTGACCGAGAGCCCTTCCCCC
TAGCCTCCTCCTGGTATGGGTACCCAAAACCTAGGTGAGCAGGGATCTCTCCCAGGGGCAGA
GAGCTTGTGTACTCTGGGTGTTAGAGGGCTAAAATATAACCAGTCAACACCACGTTGCCCAT
TTCTGGTACTTCCGGTAGCAGCCTGAGTCTCAATTATCTTGCCCAGATGATCTGAACTCTGAC
CTCTAGCCTGTTTCAGCATAGGCAGAGAGCTTGAGTAGGTGAGTTTGCATTCCTCATAGCAG
CTGGCTGAGCCTAGTCTGGACTTCTCTTTGACCTGTAACCTACAGGCCCACAGGCCCAAGGC
AACCACAGGTTGCTTCCAGGGTTACCACACAGGTGGTTTCTCATTTCTAATGCTAGGTTTTAG
ATAATTGTTGTAAGTGAGGGGCCCTGGCAGGCAGGATGACATCCTGCCAATAGGAGTTTTCT
GTCACTTTCCCACAGAGCCCTGGCTACTACATACTCTTGCTCAATTTCGCCAGTAATTGCGTC
AATGTGTTCATATCAAGTTTGGGAAGAACATCTTGGAATTGGTCAGACGTGAACTGTGGTAA
TAATGGGGGCTTGTTTTTTTAAGCAGATAATTAAATTCCTTTGCATTTGATGATTATTCTGGG
AAGCAGACTAGTCCCATAAAATGAAATGGACTCTGCCTTGCTGCTAAGTGTCTGACTTGAGA
CATGCTATCGAGTTTCTCAAAATCTCTTCCTTGTGTAAAATGTGGTTGTCGATGATTACCTTA
CAGGGGTTTTTTTAAGACTAAATGAGATCGTGTACATTAAATACAGGCACTCAGGCTGGGCA
TGGTGGCTCACGCCTGTAATCCTAGCACTTTGGGAGGCTGAGGGGAGTGGATCACTTGAGGT
TAGGAGTTTGAGACCAGCCTGGCCAATATGGTGAAACACCATCCCATCTCTACAAAAATACA
AAAAAGTTAGCCAGGGGTGGTGGCATCGCAGCTACTCAGGAGGCCGAGGCAGGAGAATTGC
TTGAACCTGGGAGGCAGAGGTTGCAGTGAGTCAAGATTGTGCCAGTACACTCCAGCCTGGG
CGACGAAGCAAGACTGTCTAAAAAAAAAAAAAAAAAAAAAAATACGGGCACTCAATACAC
CGTATAATAATAATATAGTAATAATATTTGCTTAGGATCTTTAAAAAGTTTCATTTTTTCAGA
CTCCCACAGAAATGGCTCTGCACAGCAGAGTGAAGGGGGAGAGAGACTGAGTCTCCAGGCC
AGAAAAAGGCCAGGTTTTTTGCTTTTGTTTTTAGTTGTTGCCTGGATATTGCACAGAAAGAA
AAAATAATTAGCAAGTTAAACAAAAGTACCGCAAAGTTGATTACATTGGTATTTGAGTATCA
CATCTTCTCTCAGAAGCGTAAGAGACAAGGTCGTGACCATACCTCTGCTTAGTTTTGTTTTGT
AATGGTGTTGCTAGTGATCGGCTTGTCACCAGTTACTGGTGTTTCTAAATGGACTATAATTGG
CTACTTGAAAGGACTTCCTGAGAAAGAACATTTTGGAGGACGAGGAGAGAGTGCCTTCTCTA
TTTTGGCTGCTTTCATGTGACATGCAAGAGACCATGACGTTTAGGCTGCTGCTGAGGCAGCC
CCAGAAATGGGGGCCGAGAGGTCTTTTCTTCATTTTAATAGGGTCTGTAGGTTTGGGTGGTT
AGGTACAGTTCTCAGAATGGAGGTTCCTGGCTATGAGGCCTTGAGAAAGCTGAAAGTCTCCT
TGGGAGTGTGTGGGTGGGGGGAGTCGAGCCCATCTGTTCATGGGCAGGTGTCAGCCAAAGC
CCTTGCGGGTGGTTTTGAGGTTGGTGGGAGAAAGCATCCGTGGGGTTTAGAGTTGTGGCCTT
TTCACTACTTGCAGTTCCTTTCCCCGACTTGGCTTTACTTTCTGGTGTCCAGGGGTCTGGGCC
AGATGCTGAGATTCCTCTCAGCTGACAGGTGTGGGTTATGGGCAAACCCTTCCCTGGAGGAC
ATAAGGCACCGGATTGGACTGCTGATGGGTTGCTGTTGGAGTTGTCAGGGCCTTGGAATAGT
CTTCAGATAGACTTGGGTTAGTGTGACCTGGGGCAGGCTGCAGGTTTGGAGCCATAGTACCC
CCCGCCCCCACACCGGGCACCCTGCTCTGGGCTAATGTGAGGCTTGCAGGAGTGAGTGATGC
AGTGGGAAGGGGGGCCTTTCCTGAGGATTCTACAGCTTTCTCCAGGGAATCCTCCCAGGTAG
TTTAGGCCTGCAGGTGCTATGCTATCCTTCTTTCCTAACCCTGTCTCAGGTCCTCAGCGGGGC
CATGCGGCATCCACTTATAACCCTGCAGCGAGGCCCTCTTTTCTGGCCACCTGGGTGTTTGCC
TGCTGAGATGGGAGGAACAGTGGCCTTGGGCTTCTTCCCCCGTCATGTTTATCTCTGCTCAGA
TTGGGCAGCAGCTCAATGGGACTTGACCAGCTGTGGCACTGCCAGTCTGAAGATGAGTAGG
GTGATGGGGGGAGGTGGGCAGTACCTGAAGCTGAACTGGTGAGAGAGGCAGGCTGGCCTGG
GGGCTCAGCTGGGGCCTGGGATGGTTGGTACAGTCCCCTCAGGGGGGTAGGGGAGTGAGTG
TTAGACTGCTTAAGCCTCAGAGGCCGCTCTTGCCCACCTATGCTTTGAGGAGATCCTCTTCAT
TTGTTCAAAGGGAAGACTCTGATCTAGAGATGGGCACTTGGACCAGCAAACAGCAGCTACA
GGTAGCCAGGGCACCCGAGGAGCACTTGCTCATGAGCCGGTTTCCCTGGTTTTTATGGGGGC
TGTTGCTGAGCGTCTGCCAGGGTTTGTGTCCTAGCACTTGCTGGTCTTTGCTGGGCTCTCAGC
TCTCAGGTGTTTCTCTACCAGCACGTTTCCCCCTCCCTCATATGCACACATGTGGACACAAGC
AGGCTGCCCAGGACAGAGTGTACTTTGAGGCTTGGGAAAGGACTCTCTCTCGCCCTTTTGGG
GATGAGCCTTGGAACCTCATCACCTTCCGGCTTGGGGTGGAGCTTCATCCTGGGGGTTGAAG
CTTTAGGCTCAGATAACTAGTCTTGTAAGCCAGTTTTGTCCTGTTGTTTTTTTCGTGGAAAAT
AATGTATTGACGTATACACAGACATTCTTTGTCTAACAGTCTGAGATTGAGAAATACCCTCC
ATGACTATTTGGTTTGCTTTCATGGTGAAACTTGGTCGCTTTCTTAGACACAGCCTATGGCAA
TAAGAGTGATCCCTGGCTGCTGTAATTCATTCCAGACTTTGAGCAAACACAAGGCACCGCCT
CCACCTGCAGTGGAGCCTCTGATGAACCAAATGGAAACTCCTTGGGGAATGGGGAGTAAGA
GCCAAATGTGGGATTGGACTTAAACTGCAGCTTCTTAGAACTGTAGCATTCCACGATGGGAT
TGTCTAGTGCTCTTCCTGGAGGTTACTATTCAATAGTTGGCTAGTGCACAGGTTCAGGGGTG
ACCTGATATGCCCTAGCGTTTCAGAAGATCCCTGCAAGGTGTGTCTTTTGGTCCATCTGAAG
GGTCTTGTATGGTGATCTTGTATGGATATCCGTGACGGCTAAGGCATCTGATAACTTCATTCC
TTCAGTTCCAGCAGTGTTCCTGTATTATGCTGGGCACTAGAGCTACAAAGAAGAAAACAAAG
TGCCTCCTCTTCAGGAACTCTTAATTTAGGCAGGGGAGGCATAATTGAACAGTGCTGAGGTC
ATCTAGGGGAACCAAAGTGTGTATTTATCCCCTTCCCTATCACTCCCCTCCCTCCTTCATTTCT
TCCTTTCTTCTTTCAGAAACTCCAAGTTCATATCAAAATTCTCCAGCCCTGGTTTTATTTGGTT
GTGTGAAAATTTTCCTCTAATTTCTGAAGCTATGCATTAGTTCTGCTGAGTAATCTTTAACTT
GCTGCTTTATAATGATTATAATGAGATATCACTGGGTATTATGGTCTTTGGGTAGCAGCAGG
GTAGGGATTTCCAGGCTGGGACTAAGCTAATTTATGGGTTGGGAATTATGGGGCAGTTAATA
GCAAGGCAGTCCAAGCTTTCCACAGATTCCACCCTAGGGACCATCCAGACTTAAGGAACAG
GGCCGGCAGGCTCATCCCCTTTGCACTCAGCTGGGCTATGGGTGTGTGTTTGTGAAAGAGGT
TTATTCAGTAGTCATACCTGCTGATTTCCCTGCTATCTGTTTACCCAGTGCCTCCTGTACCTTG
TTTCTTACTCTTTGTTCTCTGCTCTTACTATGAAGAAGCAGAGACTGGAATTCTGCTTGAACC
CACATCTACCTGGAAATTCCAGTTTTTCTTGTCCAGTGGAGCAGCAATCCAGTTGTTTTAGGA
CAAATGGTCTGCCCTTGAAGCTTAAATCCTTTGAGGGCCTGGCATGGTGACAGTTTTACATTT
GGCTTTGGTATAGACTGGTGTGGTCCCTGGGCAGTGAGGTCACTGTAAGGCCAGCCAGCCAG
ACCCTGGCTCCTAGGGGAATTAACAAGGCATGGGATTAGACTCACAGGGTCCCTCCTGTCCC
TAAACTTGGTAGGGGTTCCTGGGAGCCAGACTGCGATTAAGATTGTAGAGACCTGAGACCTG
AGTTGTAGGGGCCTCTGTGTTGATCTGGGCCATTGCCGGGTGAGCTGAGGCGGTCACTAGCT
CAAGGAGTGATCTCAGGATATTGTTCTGTAAGTCAGAGACCTCCAGGTTGGAGAGTGGGGCT
TGGGGGTGGGGGACAGGGTTTAGTGGGGAGCTGGTTCTGGGTGAATGTGGCCTAAAGGGAT
TTGTCCTTAGAAGACAGAGGGGTGAGTCACACACTCAGTGCTTCAGGTTCCACTTTGCGGCT
TGGCCTCAGCCCGCCCCTTCCCTGCACAAATGAAGGCCAGGGGCTATATAATTGGCTGTTGC
TGAATTCTTTGGCAGTGATTTTAAAGTCTGGTCTGGGTGTGTTATGTAGCTGCTTCTCTATCC
ACTCCCCACACCCGCTGCTTCTCCAGAGCCCCTCACAAAGCCCAGGCAGAGAGAGAGAGAG
AGAGAGAGAGAATGACTTGCCTCACAGAGATGTTGGGGATAGGGATAGGGGTATGGGTCTT
TGCTTTTGCCTTTTGAGGGGGGATAATCTCTTCCTTCATTTTAAAAGTAAAAAGTAATGCAGG
CTCATTGAAAATAATTTGAAAAGTTGAAAGAGATATAAAAGCACACCCAAATTCCTATCACC
CAAAAGAAACATACCGGCATATTTCCTACTAGTCTTTTTCATGTTTAAGAATATAGCTGATAT
ATTTTTTTTTCTTTTTCTTTTTGAGACAGGGTTTTTGCTCTGTCACCCAGGCTGGAGTGCAGTG
ATCACGGCTCACTGCAGCCTCGACCTCTCGGGCTAAGCGATTCTCCCACTTCAGTCTCCCGA
GTTGCTGGGACCACAGGTGCACACCGCCATGCCTGACTAATTTTTGTATTTTTTGTAGAGATG
GGGTTTTGCCATGTTGCCTAGGCTGGTCTCGAACTCCAGAGCTCAAGTGATTCACCTGCCTTG
GCCTCCCAAAGCGCTGGGATTATAGGTGTCAGTCACCACACCCAGTGTTATAGCTGTTGTCT
TTATAGATGAACAGATAGATTGACATAGATTCATGTAGATAGCCTGGTGTTCAGCATTTTTC
ATTTAAGATTCTGTCACAGACTTGACCCTATACCTTTAAAAATCACAAAGGCAGTATCATAG
TCTGTCAGCTGAATATGCCATAACTTAAAAAAATCATTCAACTGTTGCTGAACACACACATA
TACATATATAGTTTTTGTTTTTTCTTAGTGATGTAGTGATGCTTGTGCAGAAAGCTTTATGTA
CTTTTTGGATGGTTTCTGTAGGAGAGCTTTCTAAAAAAGGAAAAAAAGTGTTGAATGTTTTTT
GAGAAGGGCTAGATTTTCAAGCCAGTCTTACAAAAGGATAGACTCATTGGAAATTCCAGATT
TGCTTAGTGCTGGCAGATGAGTATCACTTATTGCTGAACAATGTGTCTAGAATTCTGATTAA
AAAAGAAACTAGGTCCAGGAAGTGCCTGGGGGCAGGGGCAAAGGGCCAGGCTGCAGGATA
GGCTCTTAGGATCTGGCTGAGCAGAAATCTGCTGTGAACAGAATCGGTGGGGGTGATGCTTT
CTCAGTAACTTCTCCATTTGTTTCTTTAGCAGCTAAGTCCCTGTGCTGGACTTCTGTGGACTA
CTGTGGCTCTGGGGCTGTGGTTGTGGGTGAACAACAGCTAGCTAAACCAGTGCTGTTGACAT
CATTGAGATGTGACGCACAGGAAGGTGGGAGCAAGCTTGCAAATCAGATTCTGAAACATAT
AGCACAGCTCTCCCACCTCCAGGTGGTCCTGAGATCTAGGGAGGAGCCATAGTGAGAAACTT
TAGGTTTCTAGGAATTCTCTTAGGGAGAAGCTCTCTTAGGGAGAGGCAGAACCTGGTTCTCA
GTTGGGGCTGATTCAGGTGGGTTAGATCAATAAAGCCTCAGGCCAGTGTGCCAGGCTATTCC
CAAGGAGTATACTTTGAAGTTACTCCCTTTAGAATGTCCTCAGTGGAGATAAATTCTCTCTGA
GGAGCAGTTTTGTCTGCCGGGGTCATTTGGCACAAAGCCTGGAGTGCTAGGGCGAGGTTGCA
CTGAGGGAAGGGGCAGGATTATGTCAGCAGTGTGACGGATACAGTGTGAGGTCAGGCTCCT
TCCTGCCCCACCACGGGGGCCTAGAGGTCATGGGGAGGGTCCCTGGCAGGGGATTCAATCA
TTGCTTGGCCCCATGACAGAGTATATTCTAAAAATGCCTTAAGTTTTTTTCTTTCAAAGTTTC
TTCCTGTTTTGCATAATGGCCTTTTGCCTTTGACATCCTGAAACCGCAGAGCTGTCATTGGTG
TTGCAGGACACTGCCAGCTTGAAAAAAATCAACAACAAAAAAAGAAACAGGAAAGGATGT
GGAGTTCAGGGTGCGGCCTAGGGAAGCTGGTATTTGCGTTATGGGATTGTGGGGATGTGGTA
TTAAGGTGTTGGGTAGCGCCTGACATTTAGAGGAGTACTCTGGGCAGAGTCCCTGCCTGCCC
AAGAATAGGTAGAATTGAGTCTTCACACCAAAGTCAGGAGAGACCCCCTCCCCCCAGGAAG
AGAATGAACAGGGACTCATTTCCTCATTCAGCAAACTTTTATTGGTAACTACACTATATGAA
GTGTGAGAGATAGACATGAACAAGAGAGGCCCCCACTCTTGGGCAGTCCCTTAGTAGTAGT
AGATAGACTCTGGCAATATGGTGTGGTCAGAGAGAGGAAGCCTGGGTGCTTTGAGGGTACT
GAGGAGGTGCAGGGAGCCAAATGGGTGGTCTGGGCCAGGGCCAGAGTCAGAATGAAGGAC
CTCTCTTCCAGACGTTGATTTTAGCATCTCTGTCTCTCAGTATGTTTGAACAGTCTCCCTTATT
GGAAGGGCAGGAGTCTACTGCTAAAAGTAACCTGCGATTTCCTCTACTTGCTGTCATGTGGA
AAGAATACTAAAGCTGAAATTCCAAAAGTTGCACACCTTTACCAGCAGGGCAGGAGAGGAA
AGGAAATGGAGGCAGAGTGAGCTGAAGATGATAAAAGAAAGAGAAGGTGGTGCAGTTTGG
ACTGTTATGGACAGAGGAAGTCTGAGGGTAGCTGGACTGAGGGATCAAAGGGAGGCAGTTG
AAAGGGAAGAGAGCTGCAGAGAGGGATTTCTTGGTCTGCAGAGGGTAGGAGCAAGCCTTGA
AGGCTGCTGGAGTGAGGATTCCGAGCCCTGGTCTTTATTCTTTTTCTAATTCATTACATCATT
TTAGGCAAGTCCTAACTCCTTTGGTCTCTGTTGTCTTTCTGAAATTTGAGTGGGCTGGGCCTG
CTGGTCTTTAGCCTCTGTCTTTCTCTACCTCCTAGATTCCAGTTTGGCGAGTGGGGGGGAAAA
CCTGGTTGTATATGCAACGTGAAAGGCCTCTGGAATTCCTTTTGAAGCTCACTACCCATGAG
GCTTCTGCTAAGGATTTCATCATGTCTGTCTAAGCAGACATAAAAATTTTAGCAGGTGGATG
ACCCGTAGAAATGGCACAAGGAATGTTTCTTTCTGTCACACTGTGGTATTTGATTTAAGAAA
GTTGTTATCCTCTCTGTGCCTCAGTGTTCTCACTTGTAAAATGGCAATAACAGTATCCACCTC
ATAGATGTTATGAAATACAGGTAGTAGCCACGAAAGGGCTTAAAACAGTGCCTAACACAGA
ATAAGTTGTGAATATATGTTATTTATTATTGGTAGTATAATGCTTATTTGTGAAGATTTTGGC
TTTTGCTTTATAGGACCTTTTTTTTTTTTAGTTGAAAATACAATGTTACCATGTTAAATGTTAA
AAAAAATTCTACTTACCATTGTAACAGAACATGCTCCCACTTCTGTAACAGAGCTTGCTATT
ACTTTTCAAATGCATACATATTCCAATGCATATATTCCAATGCAGTTGTAGAGTGAAACTGTT
TGCATGCAGCCATTTTTATCCAACATTATCTTATAAAATGTTATGTTGTTTATGATTATCCTA
ATTATCTTTTGTTGCTGTCTAGTATCCTTATAGATATTCCATTAGCATACACTATTCCAGGTTT
CACTATCGTCGATAATCTAGATATGAACATTTTTGTAGTGTGTAGCTCTTTGCTTCAGTTGAA
TTACTTTCCTGGGATAAATTCCTGGGGAAGAATTTCTAGGCCAGAGGATATGGTCATCTTGA
CAATACTGATTCACATTGCTGCATTGCTTTCCAAGAGGTTTGGAATCATTCACAGGTTCTAAA
TTGGAAAATCCTGGCTTTTGAAGTATGTGGATTCTAAGGGCGATTTGGATCTAGCTGGAGCC
TCACACTGACACTTCCAGCCAGTGTGTGTGTGTGTGTGTGTGTGTGTGTGTGTGTGTGTAGTT
CCCTATGCTGGACACCGTGTGTGTGTGTGTGTGTGTGTGTGTGTGTGTGTGTGTAGTTCCCTA
TGCTGGACACCATGTGGCCTTTCTGGACATTAGGGTTTTCCTGTGATTGCCTCAGAGCAGTTC
CTGTTGAATTCACTCTGTGTCCACAAAAGGAGCCTTACTGTGGCTCTTTCAACACCCACCTAC
CTTTGCCAAGTTGGTTTACAGAAAGTAAGAACATTCTTTCCTTCTTCCTTGATATGTGGCGCT
AAACCTATAGCATGGGGCAGGCTCTGGCTTTAAAAACCTGACTTAAAAATAATGGTGTTGAT
CAAAAAGTTTGTGGATCAGTTTTTGGAAACACTGCATGTAGCCATCCATAGAAACTTATATT
CTGTTGGGCTAGCCTGGGCGCCTGATCATTTAACTCATGTGGATGAACTTCTATGTAATAGCC
CTGGTGTATGGGATCCAGAAACAGGGCCCTAATGAAGAAAGGCTTTTAAATTATGTTGGATA
AAAATAAGTTGTTACAATAGCCCAAAGTCTGCAAATATGAATTGCCAGTTCTGTCCTTGTAG
TCATCCACCATGTGCCTGCATCTTTTGTAGACTCTTGTAGATTCAGAAGCCCACTGAATTGCA
TAAATGATGGAATGATTTTAGACTTAGTGATTTCAGTGACTAAAAGTTTACAGATCCTGGCC
GGGCACAGTGGCTCACACCCGTATTCCCAGCACTTTGGGAGGCCGAGGTGGGTGGATCACCT
GAGGTCAGGAGTTTGAGACCAGCCTGGCCAACATGGTGAAACCTTGTCTCTACTAAAAATAC
AAAAATTAGCCGGGTGTGGTGGCATGCACCTGTTGTCCCAGCTACTTGGGAGGCTGAGGTGG
GAGAATGGCTTGAACCTGGGAGGCGGAGGTTGCAGTGAGCCCACATCAGGCCACTGCACTC
CAGCCTGGGTGACAGAGTGAGACTCTGTCTCCACCTCCCCCGCCCCCCGAAAAAAAAAAAA
GTTTACAGATCCAGCAGATGGGGCATATTCAATTTGTGACAGCCACTCCCTTCACCTTATAG
CTATGTCATATGTCTTCTTCTCCTTTGACTGCATTCTGCAGCAGTCAGTTGTGACTTAATATG
GCACTCTGGGCCCACTGAATTAGGTCAGAGCTGCTAGTAGTATATTGTTCCTAGAGACCTAG
GGCAAGATTTTCTTACTACATAAAATGAGGGAGATAATTTCTTACCTCAAGATGTTGGTAAG
AGGAGTGAATGAGGTTAGTTATATGGTAATATCAGTACTCTGAATGTCTTTTGATCAATGCC
TAACTCATCTTCTTGGGCACAAAAGGCATACAGTCAGCACCCTTAGGCCACATATAAAATTC
CTCCAAATGCAGGTTTTCATCTGCCTTGGGGCAGAGTCAAGAGAAAGAAGAGGAAGAGGCG
TGAGGCTCTGACCACAACTTAGGGACAGAATATAGCCCAAAGCGAGTACCCCAGGCCACAA
GGAGAAGGCCGCTATCTTGTTGAATCCACAGCACTGGAAACTTGGAGTGTGTGTTCCCCTGT
GTCAGTTACACTGGAATTTTATGGCTGCTCACATTCTTCCCTTCAGGTGGACGTTGTTCATCA
GTATCCTGGGCAAGAGGCCATCATAAACCACAGACAGCTGAGTGATTAGGAAGAGGAGCTG
AAGAGGGAGCATTAGATGTTTGATTGAGTCTTAGGTGAGAAAGTATATCATTAAAACAAAA
AGATAGATGTAGGCGGGCTCAGTCTTGTGTGCCTGGTGTGTTGGTAGAAAAACTAAAGCACA
AGCCTGTAGATAACCTGCTTTATTCTACCTCGGGGCTGGTGTTGGAATCCAGGATGCCAGAC
CCTAAAGTCCAGCTCTCTTTCCAACCTACTGAATAATCCGAGAGAAATCATGTTCTCTCTCTG
GGCCTCAGTTTGCCCATGTATAAAATGAGATGAAGGATTGGCTGGGATGCTCTCCAGAGTCT
CTTCCTGCCTGGAGTTCTGACGTAGCCATGTACTCCTGCTCAGCATCGCTAAATGGCTTTGTG
GTAGGACCATTGAGTGCTGCCTCCATTAGGGCCAGCTATGTAATGCTGGGGTGGCTGTCACT
GGGCCCTAAGAGCCAGGATTGGTCTTACTGGAGAAATCCACATCCACCTAAACTTAAGACCC
AGGGGTGTCCAATCTTTTGGCTTCCCCAGGCCACACTGGAAGAAGAATTGTCTTGGACCGCA
TATAAAATACACTAATTATAGCCGATGAGGTTAAAAAAAAAAAACTCAATATTTTAAGAGA
GTTCATGAATTTGTGTTGAGCTGCATTCAAAGCCATCCTGGCCGCATGTGGCCCATGGGCCA
TCGGTTGGACATGCTTGCTTTAGACCTCCCAGCAATTCTAGTCTCTAAACAGGAAATCAAAA
GTCAAGATGAATAGATAAGTTGGTCAGTGTGAAAAAGTAATTGGTGGGAGCCACTGTAGAT
GCAGGGTTCTAGGCTCCATCAACAACCACCTACATCACTGAACGAAAGATAATGCTTGTTCA
GCACTTATTACATGCCAACCATGGTAAAAATACTTCAGATGCATTGTTTTCATGAACTCTCAC
AGCAGCTCTTTTTCTTGCCTAAATGCCCCGTTAGAACCTCCAGTACAATGTTAAATAGATATG
CTAAGAGACAACATATGTGTCTTGTTAGGGGGAAAATATCCAGTCTTTGACTATTAAGAATG
GTGTTAGCAGTGGGTTTTTCCTAGGTGCCCTTTATCAGGTTGAGGAAGTTCCTTTCTATTCCT
GGTTTGTTGAGTATTTTTATCATGAAAAGGTGATGGGTTTTGTCAAATGCTTTTCTGTGTCTG
TTGAGATGATCATGTTTTTTTGTCATTTATTCTATTGATATGGTATATTATACATTGATTTTTC
AGATATTAATCTTGCATACCTGGGATAAATCCCACTTGGTCATGGTGTATAATTCTTTTTATT
TGTTGCTGGATTGAGTTTGCTAGTATTTTGTTGATTTGTATTCATAACAGATAGTGGTCTGTA
GTCTTTCCCTCCCTCCCTCCCTCCCTCCCTCCCTCCCTTCCTTCCTTCCTCTCTCTCTCTCTCTC
TCCCCTCCCCTCCCTTCTTTTCCCCTCCTCTCCCCTCCCCTTCCCTTTCTTCTCTTTCATAGTTG
TTTACCACTGTCAGAAAAGGTCTGTTCGTTTTCTTTCGTCGTGAGATCTTTGTTTGGTTTTGGT
ATCAGGGTAATACTGCCTCAAAAAATGAGTAGGGAAGTGTTCCTTCCTCTTCTGTATTTTGA
GAGAGTTTGTGGTCGGTTTTTATTAATTCTTCTTTAAATATCTGGTAGCGTTCACCAGTAAAG
CCATCTGGGCCTGATGTTTTCTTTGTGGAAAACTTTTTGATTCCTAATTCAGTTTCTGGTTATA
GGTCTATTCAGACCTTCTATTTTTTCTTAAGTCAGTTTTGATAGTTTGTGTCTTCCAAGGAGTT
TGCTTCATCTAAGTCATCTAATTTGTTGGCATACATTTCATAGTGATTCCTTATGATCCTTTTT
ATTTCCGTTAAAGTTGGTGTAGGGATAGTCCCTCTTTCATTACTGATTATAATAATTTGAATT
TTCTTTTTTTCTTAGTCTTGCCAAAAGCTTGTCATTTTTATTGATCTTTTCAGAGGACCAACTT
TGAGTTCATTATTTGTTCTCTTTGTTCTTATTTTTCTGCTTCATTAACTTCTCTAATCTTTATTC
TTTCATTCTGCTTGCTTTTGGTTAAGTTTGCTTTTTCTGGTGTCTTAAGGTAGAAGGTTAGGTT
ACTGATTTGAGATTTAAAGATCATGCTCTTTAAACGTTTTGATAGATACTGTCAGTTTGCCCT
CTGGCTTTTTCTCATTAACAGTGTATAGGAGTGCTTATTCCTCACACTCATACCAGCCCTGGG
TGTTACTAACCTTTATATATTTGCCAGTATCATATTCAGACATAGTATCTTGTTTTAATATGTT
TCTCTGATTACTGATGAAGTTAAGCAAATTTTCACGTGTTTATTGGCCATCTGTCTTTCTTTTT
TCATCCTTTCTTTCAAGATGGGAGTCTTTGCCATGTTGCCCAGGCTGGACTCGAACTCCTGGG
CTCAAATGATCTTCCTGCCTCAGCCTCCTGAGTAGCTGGGACTATAGGCGTGAGCCACCATG
GCTGGCTTGCCCATTTGTATTTCTTATGTGAGTATTTTTTCTTTTTTTTTGAAGTGGAGTCTCA
CTCCATCCCCCAGAGTGGAGTGCAGTTGTCCGATCTTGGCTCACTGCAACCACCGCCTCCCA
GGTTCAAGTGATTCTCACACCTTAGCCTCCCAAGTATCTGGGACTATAGGTGTGTGCCACCA
CACCTGGCTAATATTTGTATTTTTAGCAGAGATGGGGTTTCACCATGTTGGCCAGGCTGGTTT
CAAACTGGCCTCAAGTGATTCACCTGCCTCGGCCTCCCAAAGTGCTGGGATTACAGGTGTGA
GCCACTGTGCCCAGCTGACTTTTTTTTTCTTTTTTTTAACCCTTTTTTTTTTTTACCCTTTTTTTG
GCCCATTTTTTTTTACCCTTTTTCTTTTAACCCATTTTTCTATTAGTTTTAAAAATATGTTTGCA
GGAGCTTTTTATATTGTGGATTTTTCTTGTTTATTACATATCATTTGTAAATATGGTCTCTCCA
TCTGTCACTCTTCTTTATCTCTGGTTTCTTTAGCTATGTAGAAGTTGTTATGTTATGTTATGTT
ATGTTATGTTATGTTATGTTATGTTATGTTATGTTATGTTATTTTTTGGAGAGGGAGTCTTGCT
CTGTCGCCCAGGCTGGAGTGCAGTGGTGAAATCTCGGCTCACTGCAACCTCTGCCTCCTGGG
TTCAAGCGATTCTCCTGCCTCAGCTTCCCGAGAAGCTGTGATTACAGGCACCCGCCACCACA
CCCAGCTAATTTTTGTGTTTTAGTAGAGACGGGGTTTCACTATGTAGGTCAAGCTGATCTCAA
ACTCCTGATCTCAAATGATCCTCCCAAAGTGCTGGGGTTACAGGCGTGAGCCACTGCACTCG
GCCAGAAGTTTTGAATTTTTATGTGTTTAAATCTATGTTTTCCTTTATGACTTCAGGTTGCTTT
CATACTTAAGCAGGTCTTCACCATCCCAAAATGATAAAATTTTTCTCCTGAGTTTTCTTCTAA
GTTGGTTCTTTAGAAGCCACCAACTTGGCTTCGACAGCAAAAGATGAACAGAATTTCTGTTC
AACTCTCATGCTGCAAGAAGCTTTATGTAATACTCCAGGGACCCTTTAAGGTCCCAGAGTTT
TCCTCCAAATCTATCAGTGATTCTAGTGGCTAAGAGTAGAAATGTGAAAATTTAGCCATGTG
TGCTGATAGAGCTGTAGTAATTTGTAAGCTCTGAAGTTCTAAGGAGTCAGGGGAGAAGGGA
AAGTAACATTTATTGAACATCTATTAGCTCAATAAGAACATGCGATAAGTATGTATATGTAT
TATTTCACTTACATCTGAAAGGAAGGCATAATTATCCCCACTCCTTAGAGAAGGAAATTGGA
GCTGGCTACATTTAAAGTAGTCCTGACACCAGAGAGATATTGCCAGGAGTACTTGGCTGGCT
GAGTGCCCAGATGGCCCATAGGAGTAGTGGGCCCTCCACAGTCCAAGGTCTGGTTCTAGGTG
GAGAGAGAAGGATGTGCTCGTAGTCAGCACCGCAGCTCCAGAAAATCTGCTGGGGCTCCAA
AACTGATTAGAGGGGCAGCTGACTCAGTAATAAAACTCCCAGGAGACTTACTTACATACTGG
AATGCAAAGTTGCAGCTTTACTGGGAAGATTAGAACTGTTATTGAGTAGCTTAGAAATCTCT
GGCTGAATTCACTGCAAGGGAAGCCGCAGGATAAGCTAACTGCTGGTGAGTCAGCAGTCAG
AGCAGGGAAGTGAATTTAACATTAGATGGGTCAGTCTCTCGTGGCTGATGAATTCATCCCCA
CAATACTGTACACCTGCCTTAGGGACCTTTGTCTGGACTAGGGGTTGGGGTCCCCCTCCTTTG
TACAGCCCTGGAAGGACACATCCAGCTCCATCCGCCATCTCTCCCTTACTTATTTCCTTCCTT
CCTTCCTTCTTTCCATCCAGCCATCAAGCTTCCTTTCATGGCCAATAATCATCATTGGGGTCT
ACTCATGGACTCTCTTGCCTCATGTATTTGTTTTATTTTGTCCTCATTCCCACTTCTATTTCCC
AGGTATATCACAGGCAACTATTCTAACGTATTTATAGTTTGTGTATCTGTTTTTGCTCTTGCC
AAAATGGAAGCCACTGCTTTATACATAGATGTATTCTTAACTTTAAAAAAAATTTTTTTAGAT
TAACCTACAATAAAATTGGCTTTTTGGCATATAGTCTATAAATTTTAACACATACATATTTTT
GTGTATCTACCACCACAATCAGGATACAGAACAGTTCCATCACCCCAAAAAAATCCCTCTTG
TAGTCACATTCTCCTCCCACCCTTAATCCCAGGCAACCACTGATCTATTCTTCATTACTATTG
TTTTGTCTTTTTGAGGATGTCACATAAATGGAGTCACACAGTATATATACATTTTTTTAAACA
TATGTAAATGGCATTTTATAGCTCATTTTGATTATATGTTTTTCATCCAGTTCTGTTTTTTTTTT
TTATTTTTAAAAAGTTTGACATAACTTCAGACTTACAGAAAAGTTGTTAGACTAATACAAAG
AATTCCTGGATATCCTTTGGAGTCCCTAAATGTTAACATTTTACTATATTTACTTTTTCCTTCT
CTCTCTCTCTCTCTCTCGCTCTGTGTGTGTGTGTGTGTGTGTGTGTGTGTGTGTATCTACCTGT
AGATAGATAGATATTAATATAATTTTAGATAGATGTATCTAGATCTCTCTCTCTCATATATAT
GTGTGTGTGTATATATCTATATCTATATCTATATATATCTCCTTTTACCCTTAAATATTCAGTG
TATATTTCCTAACAACAAGGTGATTTAAAAATATATATATAAACATAGTATAATTAACAATC
AGGACATCAACATTGAAACATTTCTGCTATGTCATCTACAGGCCTTAGGAAGACTTTGTCAG
GTGCCCCAATAATAGCCTTGATGGTAGAAGAAAACCATGTGTTGTATTCAGTTGTCATGTCT
CTTAGTGTCTTGTAATCTGAAATAATTCCCAAGCCCTTTGGATTTCATGACAGTGACATTGTT
GAAGAGTACAGGCCAGTTATTTTGTAGAAGGTCTCTCAGTTTAGGTCTGTCTGATGTTTCCTC
CTGATCAGATTCAGGTTATTCACTTTTGACAGGAATACCACTGAAATGATGCTGAGTTCTTCT
CAGTGTAACGAGATCTAGAGACACACACTGTCAGTTTGTTCCTTATTGGCAGTGTGAACCTT
GAGGATTTCATTGTAGTGGCATTTGGCATTACTCCATTATAGTTACTATTTTACCATTTTAAA
TTAAAACTATCTGGCCGGGCGTAGTAGCTCATGTCTGTAATCCCAGCACTTTAGGAGGCTGA
GGCGGGCAAATTGCTTGAGGTCAGAAGTTTGAAACCATCCTAGCCAACATAACATGGTGAA
ACGCCATCTCTATAAAAAATACAAAAAATTAGCCTGGCGTGGTGGCGCATTTGTAGTTCCAG
CTACTCAGGAGGCTGAGGCACAAGGCTTGCTTGAGCCTGGGAGGCGGAGGTTGCAGTGAGC
TGAAATCACGCCACTGCACTCTAGCCAGGGTGACAGAGTGAGACTCTGTCTCAAAAAAAAA
AAGTAAATAAATAAAAAAATTTTTTAAGTATCTTATGGGCATATACTTGTCCTGTTACTCCTC
AAACTTTCATCCACTTTTTTTTTTTTAAATTTTTTTTCTTACCTTTCATCGTTTTCTTGATATCC
ACTGGGTTTTAGCATCTACAAATGATTCTTGCCTGAATCAGTTATTATGGTAGTTGATGGTTT
TCTAATTCCATTATTCCTTCTATGTTTGTTAATTTTGGCATTCTTCTATAAGGAAGAGCTTACC
CTTTTTCCCTATTAATTAATTCATATATTAATGCAGACCTATGCATTCTTACTTCATTAAATCA
TAATCCTTTACTATCATTATGTATTCTGATGTTCAGACTATCCCAGATTTAGCCAATAAGATC
CCCTTCAGGGGAATGGTCTTTGGGATTCCTCTTTAGAGGTTCCTGGTTCCTGTTTTCTTTTGAC
ATATCCTATTACTCTTTGAGCATTTTTTTTTTTTTTTTTACTTTTAGGCACAGCAAGAAGTTCC
ATGGTCCTCTTGTTCTTTCCCCAACTCAGCCCTAGAGTCAGTCACTTCTCCAATGAGCTCTAG
TTCCTTTTAGTAGAGAATCATAATTAGAAAACAAGAATCAGTGCCAAGTGTGCACCTTTGTT
TTTAAGGTCCATCCACGTTGCCGTGTATATGTCCAGCATGTTGATTCTAACTGCTGAATAATA
CCTCATGATTGTCATCCATCCCAGTGTTTCTTTTTCCCTTCTGTAATGAGGGACTCCTGGACT
GCCTCCAGCATTACCTTCACAAATATTGCTGTGAGGAAAATCCTTAAACGTTTCCTTTATGGG
CAACGTGTGAGCATGTTTATGTTGATTCAGGGGTGCCAGACACAGCTCCAGAATGGCTGCCT
CAGTTTACATTTCCACCAGCAGAGCATGACAGGCTCTGTGTCTCCGTGAATAATCAGCATTA
ACCAGCTTCCTATTTTTTGCCAAACTAATAGATGTGCTAGGATAACTCTTTGTTTTAACTTGT
TTTTCTCTGATTACCAATGAGCTGGAGCATTTCTTCATATGCCTGATGGTCTTTGGGATTCCT
CTTAGGTAAATTGCTTATTCATTATAATCCTTTGCCTGTTTTTCACTGGAGTTCTTATATTTTT
CTTGAAGATATGCAGGAATTCCTTATACATCCTAGATATTAATCCCTTCCTGGTCTCAGACAT
TGCAGATATCTTCTGAATCTGTTATTTACTTATTTATTTACAATTTTTTTTTTAAGAGTTGGGG
TTTTGCTCTGTCACCCAGACTGGAGTGCAGTGGTATGATCATGACTCATTGTGGCCTCGCAAT
CCTGGGCTTAAGCGATCCTCCCACCTCAGCCTCCTGAGTAGTTGGGACTACAGGTATGCACC
ACCAGACTTGGCTAATTTTATTTTATTTTTTAGAGATGGAAGTCTTAATATGTTGCTCAGGCC
AATCTTGAACTCCTGGCCTCAAGCAATCTTTCCACCTCAGCCTCCTGCATCTATTATATATAT
GTTCACTTTGCTCATGCTGTATTTTGTTGCAACATAAAACTATTTTTCCCATTGTTTTGTGCAG
TCTCTCACCAGCACTCTTCTTTTTCTGTAACTGTGTTAATGCCCTTTGTTCTTCCATATGTTAG
GTATGCTGGTATAGTTGAACTCTGCTGACTCTCCTCAGTAAACAGTCTCTTTTTATGACACCT
TATCCTCTACTGAATTCTCTCTATCAAGAATGACTTGGCCGGGCATGGGGGCTCATGCCTGTA
ATCCCAGCATTCTGGGAGGCCGAGGTGGGCAGATCACCCGAGGTCAGAAGTTCAAGACCAG
CCCGGCCAACACGGTGAAACCCTGTCTCTATGAAAATACAAAAATCAGCTGGGCGTGGTGG
CAGGTGCCTGTAATCCCAGCTACTTGGGAGGCTGAGGCGGGAGAATCACTTGAACCTGAGG
GGGAGGTTGCAGTAAGCCGGGATGGCACATTGCACTCCAGACTGGGTGATGGAGAAACTCC
ATCTCAGGGGGAAAAAAAAAAAAAAAAAAAGAATGACTTGTCTTCCTCTTAGAGTGTGAGG
TCTACATACAAATATTATTCTTGTATTCAGCAAATGTATGTCATAGGCCTAGTGTGTGTTAGG
AACTGTGCTGTCACCAACAAAGTTTAGAGAGGTTATAAAACTTGACTGTAGCTTTTTAGAGG
TGGAGGAGTGATTTGAAACCTAGGCTGTAATTCCTTCCTCCTGTGATTCCTTCCTACTGTGTT
GCCTTCCCTTGAAAATTGCATTTGGGGGCCAGGTGTGGTGGCTCTCGCCTGTAATCCCAGCA
CTTTGGGAGGCTGAGGCGGGTGGATCACCTGAGGTCAGGAGTTCAAGACCAGCCTGGCCAA
CATGGCGAAACCCCGTCTTTACTAAAAATACAAAAATTAGCTGGATGTGGTGTGTGGTGACA
TGCACCTATATTCCCAGGTACTCAGTAGGCTGAGGCAAGAGAATCACTTGAACCCAGGAGG
CAGAGGCTGCAGTGAGCTGAAATTGCACCACTGCACTCCAGCCTGAGTGACAGAGTGAGAC
TCTGTCTCAAAAAAAAAAAAAAGAAAAGAAAGAAAATTGCATTTAGTTCCTGTAGACTGTG
TGTCAAATGTCTAAATCTCTTCTAACAAATGGCCTAAGGAGGTGCAAAGCGAAGCATCCTCA
CCAGCATCCTGACTTGGCAGTGAGGCATGGGACCCTGGAGGGAGTAGTGGTAAGTGTGACT
CTGGAATTCTTCCTGGGCTACTTGTCAGTGACTGGCTCCAGATTGAGAGGAGAGCCCAGAGG
ACACAGGTGGCTGCCCCAGCCTGGAGGTGAAAGTCTTAAAATAAAATGCCAGATGCCTAGA
CCATTCTAAACCTTTCTGAGAAGCTGAAATCATCCCTTCTGGAAGCGCTCTAGTTCTAAAAG
GACAGATATACAGCAAGATCTTCCTGGGGCTAATATGGAGTTTATAGGCAAGTAGGCCTCAG
AACCTTTCCCTGGTAGTGATATCTGTGGGCAGGCACAGTTTCCACACTTTCCAGAAATTCCA
GCGGAAGGAGTGAGAAGGAGGAATCTGCCCTTGAGTGAGGACCAAAGAAAGCAGAAATTC
CTCTTGGGAATTTTTCCTCCAGAGACCAAACACTACTTGGGAGCTTGTTTACTGGGCTTTAAA
AGCTTGTGACCCCCAGTCACTCTTTCTTGACCCCAAGGCTTTGCATTTCTGTGGCTTCCCCAC
TGGACAGAAGTGGAACTGTCATGCTGCCTGTTCTGGGGTCTCCCAGAGGTTTCCCCATGTCC
TCTCCTTGCTTCTACTGCCCCACAGAATTGGGGATCTGTGACCACATATGGTATAGAATTAAT
GCTTGAGAATGGTTTAGTTCAGTGATGTCAAATAAGATTCACTTTTATGCCACCTCCATCAGT
TGAAGGCCCCCCTGGCCCCTAAATTGGAAAAGATTCTGAGACAGAATCCCCGTGGGTACAG
CGCAGGGACAGTAAAGGCACGTGTGCTGTGATTTGCTATCCACTGTGTGGATGCATCCAGGA
ATATCAGAACCCTGGAAGATTATTTAAGGGGAAGTTAGGACAGCTTTTTTGCCAATCCAAGG
GTGTTCTTGAGGAAGTCTGTCTTCCTGTATGGCCTTCAGTTTCTTTCCTGTGTAACCATGGGG
CCAACACATAATTCCCACAGCTCTATTGGCCCTTGTCTGCCAGGATTCTCTAGGGTCTGATTC
GAGGTGGATCCTGGCCCTTTGAGGTGGCAGAATCTGATCATGGTGCTGTTTCCTTAGATTTA
GGCCTTGATACCCTTGGCGAGAGCATCCTGGGCTGAGTGACCACCTGAGGTTTTTCTGGTGA
TTTTGTGACCCATGTAAAACTTTGAGCTTTGGGATTATTCTCTCAAGGAAATAGTGACATTTG
GTGAAGAGCCTGTTTGGTGTGGCTATGTGAGGCTTAGCCAAGAAAATGCACCATTTTTATTA
GGAGGTTAGGCCATCCGTTGCCACAAAGTGTCAGATGCTAGGCCTAGAGCCTGGAGAAAAC
TTATTTTAAAATTGATGGGGTGCTGGAGGGGTTGGGGGGTGGTGGCTGTAGCTCATGAATCA
GGTGCTAAACCTAGAAACAAAAGGCCTCATGTGGCAGACTGTTTCTGAGCACAGATGAATG
GATGAGCAACTGGCGCAACTTTGCCCAGTTGGTCCAGCTTCCCACTTGGCCACCTAGGCTTG
CTGTGAAGACCTCGTCTGGCAGAAATGAGAGTGTTTTTGCCCCATCTTGATCTTAACTGTAAT
TTAAGACTAAAATCTTAGATTCTAAAACATCAAAGGCAAGATGGCTCCCAGCTCTGTGAGCT
CAGCTTCTCACCTCTTAGTTGAACAAGTGCAGTGTGGGTCAATACATGATTGCTGCTCTTGCT
GCCAGGAACTGTCCCAGCATAGAAAGGAATGGGACACAATCCCTGCCGTCAAGATTCTAAG
GGAGGAAGCAGGCAGGTCGACTGGTGCCTCATCTCTGCAGGGCTCCAGCCAAGGTTTGTGA
AGGATTTTGCAGGCATATGGAGTGGGGACTGATTGATCCCGAGAGGGGACTGGGGAAAGCT
CTGAAGAGGGGATGACATTTGGTTTGAACTCCAAAAAATGGTTGCTTTACCTGTTTCCTGAA
GTTTTTGAGGTGGCTTATAAGAACATATACCATAAAAAGGACCAATATAAATTTAAAATCAG
AAAAAGAGAAAATGGGCTGGGCATGGTGGCTCATGCCTGTAATCCCAGCACTTTGGGAGGC
CAAGGTGGGTGGATCGTGAGGTCAGGAGATCGAGACCATCCTGCCTGGCCAACATGGTGAA
ACCCCGGCTCTACTAAAAATACAAAAAATTAGCTGGGTGTGGTGGCACATGCCTGTAGTCCC
ACCTACTTGGGAGGCTGAGGCAGGAGAATCGCTTGAAACCTGGGAGGCGGAGGTTGCAGTG
AGCTGAGATCGCACCACTGCACTCCAGCCTGGGCGACAGAGTGAGACTCCTCCTCAAAAAT
AAATAAATAAAGAGAAAATGGAACTTAGAAAATTAAGAGGAAGAGTGAAAAGGTAGATAT
TTAGTCAGGCACAGTGGCTCATGCCTGTAATCCCAACACTTTGGGAGGCCAAGACAGGAAA
ATCTCTTGAGACCAGGAGCTTGAGACTTGCCTGGCAACATCTCAGGTGAGACCTTATCTCTA
CAAAAAATTTAAAAATTAGCTGAGCTGTGTGGCTCGTGACTGTGATCCCAGCTACTCAGGAG
GCCGAGACCACAGCCCAGGAGGATCGCTTGGGCCCAGCAGTTTGAGGCTGCAGTGAGCTGG
CACCACTGCAATTCAGCCTGGGCTACAGAGCAAGACCCAGTTTAAAAAAAAAAAAAAAGAT
ATTCAAACCATGGGTCCCAACGTAGTTATTATATTTGACCATTTGCAAAAGCTGAAAGCAAA
ACATGTTACACATTTTCAGAGAGGAAAATACACAGTAGTTCCTGAGTGTAAGTTGTTTTTCTT
GACCTCATTCTTAAATTGCTTCATGAGGGTGGGAGGGAAGTGGTAGTTAATAAGTGAACCTG
TAAACCAGCGTTTCTCAAAATGTAGTCCAGGGAATTGCATCAAAATTGCAGTTACCTACAGT
GCTTGTTAAAATGCAGATTCCTGGGCCCCTGCCCCAGGCTTATCAAATCAATCTGGTGAGTA
GGACTCAAGAACCTGTAAATTCACATACTTCTGCAGATGATTCTTCTTGCACTGCACAGCAT
GAAAGCCTCTGCAATAGACAGAAAGCTACCAGCATTGCGAAAGCAACTTGAGTGCTTGGCC
TTTGAAGGTTGAGTGGGACTTTAATGAGGGAGAGAGTAAGGCATGAGAAATGGCAGTTCCA
CTGAGGTCAGTCAGTGGTTCATTGCTGACGAAGTCACTTTTAAGTCATGTTTTAGAAGAACT
ACCAAGTGTGGCAGGTCAGGCATGTGGCAGGACTGTTTCTGAGCACAGATGAATGGATGAG
CACCTGGCCCCACTGTGCCCAGTTGGTCTAGCTTCCCACTTGGCCACCTACGGTCTGCTGTGT
GGACCTTGTCTGGCAGTCTCCTTTAATTTATTTTTTATTATTTTTTTCTTTTTGAGATGGAGTC
TTGCTTTGTTGCCCAGGCTAGAGTGCAGTGGCATGATCTCGGCTCACTGCAGCCTCCACTTCC
CAGGTTCCAGCGATTCTCCTGCCTCAGCCTCCCAGGTAGCTGGGATCACAGGCAAGTGCCAC
CACGCCCAGCTAATTTTTGTATTTTTAATAGAGACATGGTTTTACCATGTTGGCCAGGCTGGT
CTCGAACTCCTGACCTCAGGTGATCCACCCATCTCAGCCTCCCAAAATGCTGGAATTACAGG
TGTGAGCCACCGCACCTGGCCTATTTTTTTTCAGCAAATTCTTTGTTTTTCTCTCTGTTCCCAA
ATGCAGGGTACTGAGACCACAGATGTATTCTGTTTCCTGTTGAAAAAATGTTTCTCACTTAGC
TGGGTGTGGTAGCATGCACTGCAGTCCCACGGGAGGCTGAGGCGAGAGGATTGCTTGAGCC
CAGGAGTTCGATAATCATGCCATTGCACTCTGGTCTGGGTAACAGAGCGAGAAACTGTCTCT
TAAAAAAAAGAAAAAGAAAAAGAGGTCCTAGGGAAAGAAACAAATAGTGGCTTGGATGGT
GAGTTGGTGGAAAGAACAGTGGGTGTTGGGGGTGTTGAACTTGTGTTTGTGTGTGGTGTACC
CAAGACATATCATGTCAGCATTAAGAATAGACTATTCCTGTTTTCTGGTCACTGAGTTGTATG
TTTTGACATCCTTATTTTGGAAGATACTTCCTTACTAGGAATGGGATAGGGAGGGGGTCACC
TTTCCCATCTGTGGGTCATATTTTAAAATATTTATTGTTCAAGTTTAAAGATATAACCAAAGG
TATAAAGAAAAATACCACAAACATCTGATTTAAGAAACAAACCAGCCGAGCGCGGTGGCTC
GTGCCTGTAATCCCAGCACTGTGGGAGGCCGAGGCAGGCAGATCATGAGGTCAAGAGATCG
AGACCATCCTGGCCAACATGGTGAAACCCCGTCTCTACTGAAAATACAAAAATTAACTGGTC
ATGGTGGTGTGTGCCTGTAGTCCCAGCTACTCGGGAGGCTGTGGCAGGAGAATCGCTTGAAC
CCAGGAGGCGGAGGTTGTAGTGAGCCAAGATTGTGCCACTGCATTCTAGCCTGGCGACAGA
GTGAGACTCCGTCTCAAAAAGAAAAAAAAAAGAAAGAAATCATTTCCTACACCTTCGAAGC
CTTCATGAGTTAGATTTTGAAACAGTGCAAAATGCTTCACGTGAGAATCGAGAGTCCCTTCT
GGTGGCTCTCCATCCCCTGCTCTTCTGTCAGGTTTTCTTGTAGGTTTATGGAAACCTTTGTTAC
TTGTGCAGGTGGCAGAGAAGCAGAGAGGATAGCTGCGCGCCACCCACACAGCTAGGATTTA
TTGGCGTACTCCCACGTGCATGGCAGCCAAGTGGACACAACTCTGTGATGAATCCTCCCAAG
AGAACTGAGGGGCCCTGATGGAGGAGCTGCTTCTTTGCAAAGCTTTCCTTGACTCTCTTCCTG
TCCCCTAGTTGATTCCCCTTCTGTGCTAGTTTTAGCTTATTGTTTGTTACCTGTCACACTTAGC
AGTACTGTTGGCTTTGCTGGTCTCCTTGACTACTGGGGGTAAAGACCTTTTGTTGTTGTTGTT
GAGACAGAGTCTTGCTCTGTCGCCCAGGCTGGAGTGCAATGGCGTGATTTCGGCTCACTGCA
ACCTTCACCTCCCAGGTTCAAGAGATTCTCCTGCCTCAGCCTCCTAAGTAGCTGGGATTACA
GCTACACCACACCCGGTTAATTTTTGTATTTTTAATAGAGATGGGGTTTAGTAGAGATGGGG
TTTCACCATGTTGGCCAGGCTGGTCTCAAGCCCCTGACCTCAAGGTGACCTGCCTGTCTCAGC
CTCCCAAAGTGCTGGGATTACAGACATGAGCCACCATGCCCAGCCTCAAAGACCTCTTCTTT
ACTTGCTCACCCTGCCGCCCACTCCCCTACCAACCCCTGCATGCCCTATACCACCTGGCACAT
GATACATACTAACTGGGTACATGTTTGAATATGAATGGATGTGGTGCTGTGAATGCTTAGGG
GAAGTGGGTGAAATGCTTAAGAACCAACCTTGAGTGGTCTGGGAAGGCTTCCTGGGAGGGT
GGTGTTTGAGCTAAGGCCAGGCAGCTGTTAGATTTGTTAGACTGAAGCCCTTGCAGACTTAG
AGAGCTTGTGCTCTTCCCAGAATGACGGGTGAGCCACGTACAGTAAATGGTGCTTCTCATTT
CTAGCCCAAGGGGCCTCAAGGGGCACCGTGATTTCACGAGAATGCTGCAAGCAAATCTTTTC
TCAAGCTGGGGAATTTGGTGGTAATGCCTGGCTCAGCTTGCGGTGCGCACCTGGCCTTTGGA
AGATTGGTACAGAGAGAAGCGGCCCATCCACATGAGCCTGTGGAACAGCACTGGTGGGGGA
GCTGATTTGTGAAGAGGGGCTGTGCAGTGTACTGTCAGGTCTGAGACCCAGGAAGAAATTCC
AGTATCCCAGCTCTCAGAATCACAGAGTTCTAGGCACTGCCTAGTTCCACGTGTTCCCAAAT
GTTTCCTGAATACTTGGATTTCCTGTCCAGAGAATTTTCAAAACAAACTTAGAGGCCTGACC
CATGGCTGCCAAGGAAGGATTTTTTTTTTAAATTAAATTTTAAAAATCAGTCCAGCATGAAA
ATCTATGATGATTTCATAAGAGAAAGGACATTTTAATATTCAAAGAGTAAGAAGCACTTAAT
CTTGGAAGAAAGGGCATTCCTATACTTTGATTACCTTTAGTTTAATTAAAAAACACCTACAT
GGTCTTTACTTCTGTGATTTCATTCCTGGGCTAGTGAAACATTGTCACAATAAAGCATCAGGC
CAACGCTTCTTTCGACCCACTGGCCAATCAGTTGACAAACAGTGACTAGATGTTTCAGCCTA
TTTTGCTGAGGCTAAAGGATTGAACTAGTGCTTCAGCCAGCATGAAAACCAGTCAGGAGTCC
GTGCTGGTGTTGGCTTAGATTAGCAGGGCCTTTGATGGAGGGGCATGTATGTGTTTGGGTTT
GCTGTGCCAGGCAGGGGAGCAGTGGAATTTGTCTGAATTGAGCTCACACATTGAAGTTATTG
AGCGACTTACATGCAAGGCCATGACCTGGACTCCCAGCCGAGAGGCCCACGTGGCGGGGCT
TGAGCTGGGGGAGCCGAGGACAGCTTACATCTGCTCATCTGCTTACGTAACCCTGCCTCCCA
GCTTCCAGAGCCAAGAAAACACACAAGCCAGCCCAGCGGGGCCGAGAGCCTGTGGTAGCAC
ACGCCATGCGCCGCACAGCAAGGGCGCCTTGGCTCGGCTTGAGGCCTGTCATGAAGCCCTCA
GCCCTCTGCCTCCTCCCAGAGCTTCTCCCCACCACCCCAGGCAGTGGCTCTGAAACCTGGTC
GCAGGTCTGCATGATTCTGAACAGAGGTAGTCGTTGCCTTCCTGGAGTCTGAGCTCTCTGGA
GTTTCTCACTGGGACAGAGCCAGGTGTGTAGCAGAGCATGGTCCCTGCAGTATGGCAGGAG
GTGTGCAGGGCATTCAGGAGGCCTCCTGGCTGGCACTCGACCCAATTAGTCATTCAACGCCA
GGTCTGGGGCTGCTGTCTGTTGTCTCAAAGGTGTGAGCTGCAAGATCCTTAGAGTTGTGGAG
AAAAAATTGCCAGATTGGCAAGAAGGGCAGGATTGGGGGTCAAGGTGTCTCAGTGTGTTGG
AAGCATGATGGGGGTTGTGCAAGGGGCACAGCGAGTTCAGAAGGGAGCAGGAGAGTGAGA
AGAGGCTGTTCAGTGATAAAGCTCTGCACAGAGCCATTGGAGGAGCAAGCTCCTTGACCATC
CTTAAACCAGGGTAATTTTCATTTAGGTTCTGCCACACGCTCAGCAGGGAACTCCTGGAAGG
CAGGATTTGTCTTGTCCATCCTCCCTCCCTACCTCAACCCACTCCTCCTTGGGCTGGCACACA
GTAGGTACCCAGAAAGTATCAATTGAAACAAATTGAAAGTGGTCTTGATACATATCACAGG
GCAAGTTTGCAGTTAACAGACATTTCAGAGTAAAGACTCTCTGGCTTGGTGCTCGATCGGCT
TCTGTGGGTTGTCAGCATGCTGTGGACAGCCCCGGCATGGGAGCGAGTGGGCGTGTGTGTGT
GTGTATGTGAGGGTGAGAGAGCGTTAGTGTGTGTGTTGGGGTTGGGGAGAGAGGAGGGGGA
ATAGAAGATGGACCACCCGGGTATCAGCTTCTGCCCTGGGGAGATGGTGGTGTCAGTTGCTG
AGGGAATCCTGAGAAGCAGGTCTGGCTGTAGGTGGTGATGGTGGTGGGGTTGCATGAGAAT
CCATTTGGGGCAGGTTGAATTTGAGGTGCCCATGACATATGGCTAGCCATGTTCTGTTGGCT
GTGAGGTCAGGAGAGAGACATGAGATGGAAACAGAGGTTTGGGAACTGTCATGTGCTTAAA
CCAAAGACCTGGGTATAGGGAGAGTGAGAAGAGAAGGGGGCAAAGATGGACATCCAAGAA
AGAAGCTGAGAAAGCCTAGGAATTTGAGGTAAGAGGAGACGTAGGTAAATGTGACGCTTGG
TGATCAAGGCTTCTTTCCACCTCTCCTATGCTGGACACTCACGTCTCCTGTCTGCTTGGAAAT
TCATGCTGAGGGCAGGGAAGGTGGGAGCAAGGATTTGTCTAAAGATCTTGCTTTGGATCCCT
GCACTCCTCCTGGTTTACCAAGTGTCACTGGACACGTCAGGGCGTTCTGAGACCTTAGAGAG
CATCCAGTCCTGTCCCTGCAGTTTACAAATGAGGAAACCAGTACCCTGAGAGTGGCTGTACT
ATCCACTCTCAGGATACCAAAGATCATCTGGAAAGTCACTGGTGGAGCTGGACCGGGGCCC
AGGCATCTCTTCTCCTGTCCGGGGCTCTTGACTTCAGGACCACCTTTCTGAAACCCATGATGG
GGCAACACCAGGACACTTTCCAGCCTGCAGGTGTCTGTCCCGCGGAAGCGAGCCAGGCCAC
ATGTGAATTCCTGTTTTCTGGGTGGGTTTCAGAAGGTACGAGCAAGTCGGCAGGGTGACAGC
CCAGGTGCTTCTTGGGTTCCCCAAAACGCGGTTATGTTTAGCAGCATCCTCAGAACCAAAGG
TGGGGTGGGGGCTGCAGATGTTGTGGGGGCCCTCTGAAGTGAAAAGAGCCCTGTGACAGAT
CTTTTCTTCATGTTTTTCACAAGTTCACTGTGCAGCAGGGCCCCCCCAGTAGCCTTTGCCCAG
GGTTGGGTGTTGGGCAGCCCAGGCCTGGCTGACCTTGTGGGGAAGGGTGTGAATGGTGGGA
ATCCCCGAGGGCCCTCTTTGCCCGAAAGCCCTAAGCCTTGACATCAGATGCCCATCAGATGG
TCCATCGGAGCCCTACTACCCAGCTTGCCCAGTGAGAATCATCTGGGCTCCTTGTTAGGTAG
CCATTTAGGTCCTTCCCAAAATCCACAGACTCTCTAAGGGAAGGGCCCGAGATGCTGTACTT
GTACTAACTTCCTCAAGCAATTCTTGTGATAGGTTTGGGAAAAACTTGTCCAGGGTGACCAC
TGACTGAGTCCTGGTCTTCTCTGAAGAGCACAGTGCCTGCTCACTTTAGGGCACCCTGGGAG
GTGGGAGCTGGCTCAGCAGGCAGTCTTATAAGGGACTGAGCTTCAAGGCCTCTGTCCCTCCA
GGAGGGAGGTGCATGACCAGAGAGGGAGGCCTGAGGATCTTCTTCCCTGCCCCAGAGGGTC
TGCTGCCTGAGCTCTGTGATAGCGCAGAGAGTAAAAGGATCAAGCTTGATTGAGGCCTATCT
CTCAATGCGAAAGTTTGCTAGTTAAGAGGAGAGTGGGAAGGGCATTTCTGGCAAAGAGAAA
AGTGTGGACAGGCATGGCTTAAGGGATGGGGAGGGAGACAGACAGAGCTGAGGGTGAAGG
GCCTTTTGCTCAGCTGTGGGCCTTGGCCTTCCCTTGTGCAGGGACACACAGCCTTAGAGCCA
CTGGAGGTTTTAGTGGGAAAGTAATATGGTCGGGGCTGTATCTCAGAAGAAAACAAACTAA
TGGGAACAGGTCCTGTGATGGTGGACCTGGGTCAGCTACGGAGGGAGGGAAGATGTGAGAT
GTGTACTGGGGAAGGGGGTGGAAGTGGCAGCTATCTGGTGAGAGGAAGCAGGCCCACAGCT
TTTTTTCTCAAGCTGTTGAATTCAGAAGGGCGAGTGATTCCGGGAGTAGGGGGTGCTTGGAG
AGCCACGCGTTATTGATAAACAGGGCAGGCTGAAGCCTGCTCACTGGCCCTGGGCGGGTTCT
CACCAGCATGTTTCAGGTTTTGATCTGTGCTTGTGGTTGGTGTTCCTACCTGTTCTCTAGGTTC
CTTCCTTTGTTCTTGTGGCTCATTTGCTTCACAGGTGAAGCTGGTTACACTAGAGTAACAGTT
CCCAAAGTGTGTTCCCTGGAAAAATGGTTCTGTAGCCAAATAAGCTTGGGAAATGGTGGGTT
AAATATAACGAAGGGGGTTTTTCGACTGCACAACTTCTCAGAGCCTTTGGTGTGTGTCGTGA
CTTTGCAGAAGCAGGATTTAATACGCAGCATTCCCGTTCTTATTTGACCACGAGACATGTTTT
TCCATTAAGCATCTTGCTGGGTCTGATGTTTTCTGGAACCCATTTTGAGGCGGTCTGGTCTGC
AGAGAGTATGGGGAGCCTGGGTTCAAGCCTTGGCTCTTGACTCTCAGCAGAGCCTTGATTCC
CTGTGTTGCCTGGACTGCACCACGTGTACCACATACCCGGTATGTGACGTTTTCCTCATCCCT
CTTCCCACCTGCCGTTACCTCACAATCCACAATCTGCACCTCATCCATTTTTCTTCTGAGGCA
AGCACTCTCTTACTAACTTACTTATCTCATCTGCATCCATGTTCTTCTAGGCCAGAAACTTGG
GAGTCATCCCTCCCTCTTTGTTACTTCTTCTTCCTCTTTGTTACTTTATCCCCTCTGTTACTAAA
CATTCTTCTGTGTTTCCAGCTATTTCTTTTATTTTCCCTCGGTCTCCTTTGGGGTTTCTTTGCCT
CCATCTCTCCCAGACCTTGGTTCACCTTCCATCGAGTCCCTTCCTGGGACATGGGCACTCATG
CCACTCCTGCTACCTTCCACTTCGAAGCTAACTCCCTCCACACTGACGTCCCCAACATGCATG
CATACACACACACACACACACACACACATACACACACACACACACACACTTCCCCAGTTAG
GCTAGAATCAGAGAGATGATGTCAGCCATTTGTCCAAGGCCACGCAGCTGGGAGGTCACAG
AGCTAAGTCTCAACCTCAGGGGTTTTGAGAAATTGCCTTCTCATCCGTGATCACTGATTTCTA
CAACAGCCTGTCAGGAAGTCTGGGTAGAAATTACTTCCATTTTACAGTGGAGTCAGAGCGGG
GAGGGTCCTGGGCAGGCGAGTGCTTCACAGAGTGACCAACCATCTAGGTTTGCCCCACACTG
AAGGGGGTTTCTGGGGATGGTTGGTCACCCTAATGCTGGATGTGGTGCCTGATGCTGGGCAG
GAGGGCCCTCTCCGTGGCCACGTTGCCTCCCAGGAGGAGACATTTCCTCTGCAGCTGCAGCT
GCAGCCTGGCCATCTGATGCAGCCTGTGGAGCGGTGGCGAGTCCTGTGGCCTGCTAACTTCT
CCCTCCCTCCACCTCTCTAGTGGGCCCCATGCTGATTGAGTTTAACATGCCTGTGGACCTGGA
GCTCGTGGCAAAGCAGAACCCAAATGTGAAGATGGGCGGCCGCTATGCCCCCAGGGACTGC
GTCTCTCCTCACAAGGTGGCCATCATCATTCCATTCCGCAACCGGCAGGAGCACCTCAAGTA
CTGGCTATATTATTTGCACCCAGTCCTGCAGCGCCAGCAGCTGGACTATGGCATCTATGTTAT
CAACCAGGTGAGGCCTGGGAAGGTGGAATGAGAGAGGGTGTGTGTGCATGCAGATGTGTAT
CAGATGTGTGTGTAATGAGGGCAGGGGAAGGGGAGTGATTTCACAGACACCTGGCACTTAC
AGCGAGGAACCAGCCCCCCAGCCACCACCAGTGCAGATGAGGTAAACGCCAAACAGTGTGC
TTGCCTATTGCTGTCAACTCTATAGCCAAGGGAAATGCTGGAGTGTTTTCGTTGTTCTGTTTT
TGTTTTCTGGAAGTAGCCTTCCAGCAAGATTGGGAAAAAAGACAACCCTAATTATTCCAAAG
TACACACTGATTATTCCCTGGCTTTGTGTAGCTGTGTATTTTCCTTTTAAAAATAAAACCACC
ATTTAGATGTCAGACTTTTAGGTAACTTCAAAGTTTATCCAGTCAGTCAGAGCGTGTCTCCTG
GGGCACCTGGAGACAGTGCCCTTAGTTCAGGTCACATGCCTACATGCCAGCCCCTGGTGAAA
TATCTGGAGAAGTCTGATTCGTGGGCCATCTGAGAGTTATGTGGACTGGGCCGAGTCTGAGA
AAAAGTTTCTCACTGCTCGTCTGATCCATATGTGTTGGGCTTTAGCCCTGCTTAGGAAAGTAA
TGCTAAGGATAGGTCAACTTTCATCACCATGGCATGGAGAATCAGATTGATCTAAGAGGCAT
CTTTATTGAAATAAATTTTTCAGTTTATTTGAGGAGCATTATTTTCCCAAGAGTATAACTTTG
ATATTTCAAGATTACCCCTAACACTTAAATTCATGTTTTTAGACTATAACCTCCTAGGTGCAA
TGACACATCTAACTTATCTAAGCACCCAGTTTCATTGAAATTCATTTGAAGAGTCTGAGTAC
GCCCATTTCTACAAGGCCCAATGTCCATTTCATTTCGAGATAAACTCTGCTTTAGGTAGGAG
GATTGTTGGCAGTTTACGGCTTCCATCAAGGTCAAGGAACTCTGTGCACCTTCCCTATGACCC
CAGGGGAAGCACTCGAGGACTGCTGTGGCATTGTGCTGCATCACTTGCTGCAGGGAGATTCT
GAAGAAGTGTAAGGTCTCAGTCCTGCCCTGTCCCGAAGCCTCCAACCCACTTCTGGCAAGTG
GGACCTTCCCAGGGAACAATTTGTTAACAGACCCAAATATCCTGTGATTGGATGGTGGCTGC
CAAATGCTTTGGAAGCTCAGAGGAAGGAGAGAGAGCAATGGCTTGGAAGAACCAGGATATA
AACTAGGTTCTAAAGTCTGCAGGGAGATGGGCTTCTCAGCTGGGGCCAGTGAGCAGGGACC
TTAAGGCAGAAAGGAGCCTTGCATGTTCCTGGAAATTGAGATGCCCACTGGGGTAGGAAAG
CACCAGAAGCTCTGGGACCAGGTGTCAGAGTTAAGCCTGTGAGGCAGGAGAGAGCAGAACA
AGCCCTGTTACAAGGAAACTGAAGCAGGAGAGCAGGTGGTGGGCAAACCCCTTGAGGCTGT
TTGAATTCTTCGGCCAAGTGAGGTACAGACCAGGGCCCTATGAACACCTGCAAGCAAGACA
GCCACGCAGTTGTGGGTCACCTTGGAAGAATATTGGAGAATGCAAGAGAGAACAGGTAAAT
GTCCTGCAAAATGCGGGTCACTTTAACCCAACACATATTCATTTAAGAAAAGCTCTGTGATT
GAGAAACATTTGTCTGATGCCAGTTAGCACATACCAATGACGGCAAGATTCAGGAGCCTGTT
ATTAAAGCAGTGGCAGCGAGCACCTGGAAGAGGCGGCCACCATCACCAGGAGCCAGCAGG
GATGACTAATAAGCCGTGCCAGCTGCATCTCGTTTCTCTCTTGACAGTTGCTATGCCAGTAGA
TGAGGGATGTACTGTGGATACAATGCTGTCATATCTTATTCAGCAGGGCATCTGATAGCATC
CCACAAATCTGCCTGAGTAGAAGACAGACAGCTGTGGTCTGGGTGCCATATAGGTAGGTTA
AAATATATATTTGGGCCTAGGCGCAGTGGCTCATGCCTGTAATCCCAGCACTTTGGGAGGCC
AAGGCAGGCGGATCACTTGAAGTCAGGAGTTCAAGACCAGCCTGGCCAACATGGCGAAACC
CCGTCTCTACTAAAAATACAAAAATTAGCTGGACATAGTGGTGGGCGGCTGTAATCCCAGCT
ACTCGGGAGGCTGAGGCAGGAGAATCTCTTGAACCCAGGAGGCAGAGGTTGCAGTGAGCCG
AGATCATGCCACTGCACTCCAGCCTGGGCAACAGAGTGAGACTCTGTCTCAAAAAAATAAA
ATAAATAAATAAATAAATAAAATATATACTTGGGTAAAGAGGATAAAAGAGTTAGCGATGA
TGCTGAATTTTTGAACTGAGGTGGCTGTTTTCAAGGAAGACTGGAGGGTGGGATGCTACGTC
TAGATATGTTGCAGTTTAGGTGAATGTGAGACTTCCCTGTTTTGAAGTCAAATATTGGACCA
GTAAAATCTAGCCATCAGCTTAAATTCCTATGATACAATTTACATACTCCCCAGGCTCAACA
CAGTAGATTTCTGAATGTCCTCTGCCAGCTACATGCTCCTGCCCACCTCAATCCGAGTAGATG
GAACAACTAACCAAGCCAGCTCAGACCGGTGGCACAGCTGTGCTGGCTAACACTGGGCACC
ACCTAAGAGAGTGCTTCTCCAAAAGTGTGCTTCCCCAAATGGAGCGAAATACGCTTGAGGA
ATGTTGGGTTGAACCATGTAAAGCAGGTCTCATTCCCGCAGAGCCTTTGGTACCCCGGTGTA
CACTGTAACCCCAGAAGTGTTTCCTGAGCTTGCCTGACGAGACAACTTTTCCAAGAACCGTC
TCAAGTGATGAGTGTTTTGTGAGTCACACTTTGGGGAAAGCGGGCCTAAGTTAGCATCTCCT
CCCAGCTGCCTCCCTGCTTTCCCTGGAACACTAGGAACTGCCCGTCCTCCCTCCCTCCCTCCT
CTTCCCACTTCACAACTTAGCATCAGGAATATTTTAGTTTTGGTTTTTCAAACATATATACCT
CCTTTTTTCTTATCTTGTCAATATCATCTTTTTTTTTTCTTTGCTTTTCCTCATACTTTTTTTTCT
CTTCATCCTTTCCTTCTCCAAGGGTTAACTTTCCACCTTAGGAGAATCTTTTCTGCTTTTTCTC
CCACTTCCCCAGCTACTCTCTTATCATCTGCTCCAATCTCACCCTAATTGATCATTTTGGGAA
AATATGGTCAGAGTCCAGATAACTAAGTTGAGAAATGCTTAAACTCTGCCATACCTTTCCAG
TAAAGAATATTACCTAATAAATAATAAAATGGTAATGGGAAACCTGAACCCTGAAAAAAAA
GAGGTGGAAGGAGAAACATTTGGAGCACATCCTGTCTACAAATTAGGAACTGCCTGTGTTAT
CTGTTTTATGGTTATATTCTAGAAGAAGAAAGGGATTTTGTAGCACCTGGTTTTGACCTTTCT
GCACTGTTTGTTGAGCAAATAAACCTTATGGGCTGTTAGCCCTCTTTATAGCCTCTCAGCTTA
TCCCTGGCCCAGACACCCTGCTGTCATTTTGACTTTTCATTCCCACACACACATACACATGCA
CACACATGTACACACACACACATACCATTTAAGATTAGACAGAAGTAATGCTCAAAATGGA
GTGGCTTCTGAGACATTTAGTCCAAGGGTTCCCAAACAGGCTTTTCAGTATCAGATTTCTTTC
TGCCCCATTGAAATGCTACACAACCTTCCGCTTACAGCAGGTCACAAGGGTTTCATTCTACTT
GAAGTAGGGGCCATGTCCCATTTCCACTTCCTTGGCTTCCCATTCAGTCACTGCTAGGATTTG
CCTAGACCCCTGAGGCCAGACAATGTAGAAACTTCTGCTCCATGTCACAGGTGAGGAAACA
GGCTCAGAGAGGGACAGGCTCCGAAAGTCACATAGACAACAGTAGGGCTGCGGCTCAAACC
CCAGCGTCTGACTCCAGGTTTAGTGCCTTCTCAGGGCATCAGTGACACTCCTCATGGCCAGG
GTGCCCCCAGTGTTGCTCACAGTCTGGTATCCAGGGCTGAGAGTGTGCTGTGTGCTCAGACT
GCCTGGGTTCAGTCCTGGCACTGCCACTTTACAGTCAGTGACCTCAGGCAGGTTACTTAAGC
TCTGCAGGCCTCAGTTTCCTCCTTGGTGGGGAGGGTTATGAGGCATCCTTCTCATGGTAAACC
TTCAGTAAATACCAGCCGTTACTAGGAGGGTCCACTCCTGCCTCTCCACTCTCCATTCATCCT
GCCTGTTTCCTCTGCCTGCTTCCTCTGCCTGCTTCTGTGGTGGTGAATTCTTCATGGCTCCCAC
CGCCTCCTGCTGCACCCCCACTCAGGGCCCGCATCAGGACCCTTCCTCCTATTGGTTTGAACT
CCTTGGAGTCAGAGGGTAATGGATAGTGGAGTGAGCCAGGTGGCAGAATCTCAGAGGCCAT
CCCGGGCCTATAAGCCTCTTCAAAATAGGGCCACGTATCAAGCTTTACACACAGGAGTGAAC
TTTCACAAGTTGTTATGACTCATACTCTGTCTATAGTAAGCTGTTAACCACTCCCATTTGGCT
TATGCCTCTGTAATTATTGTACTAACTTATATCTTAAAATAAGGATATTGAAGGAATGAGCC
GGGAGAGGCTTTCCTGGTTGAGATATAGAAGAACAAGAGTTGCTCTTTTTCCTTAAGGTCTC
TCCTCCCACCCCTGACCTTAGCTCACCAGCATGGGAGAATACTATTTGACTCCTTGTACTCTG
AGACGTGGATTTCAAGATATAGCATTCCAACTTCAACGGCAGCAAGAAAAGAAGCAACAGA
AGGAGAAGACATCATAGCAAACAGGGATGCATGCTGCATTTCCTAATACTCAAACCCGGAA
ACGAGACTTCACTCAAGGTGAAGGGAGGGCAGGTCACCACCTGGTAGCACTAGCCCTAAAT
TAAGGAATGCAGAATGTTTGTGGGATTGCCCATCATAAAAATTACAAAATGAGTAAGGAAT
GCAGGCACAGCTGGCCAGGTGGGTTTGTCACAACCATGGCAGCCCTTTGCCCCACAGCCAGT
ACACAGAACTGGTCTCTCCAATTCCGATTGCATATCTTCTGGCACCTCTGTTCCTCTCCCTCA
GCTGCCCAGGATTTTTCTGGTTCTGACCATGTTACTTCCTCTTTTAAACCTGTTAGCATTTCAC
GACTGCCTACAGGCAACGGTCTAAATGGTCGGAAGGCCCAAGCTTAGCATCCGAGACCCTG
ACCTACCTCCAGCCACTTCCTCCTCCTCTCCACTTCACTGGACTCCCCATCTCCACCCAGACA
CCTCTGTTCTCCCCTCTGTGTGCCTTTGCTTATGCTGTCCCCTGTGTTCCTAGTGTGTCTCTGG
CTATCTTTTAAGCTTCCCTCCCCAACCTCATTAGTTCTGTGGAGCCCCTGGAATAGAGCTGAC
TTCTCCTTCCCTGCTGCTCCCAGGCTGCTCAGAACTTTCTGGAAAGGGATGATTATCTGAGTT
CCAGCCTCACCCCAGCCCCCGGACTCTGAGTCCCTCATGTCTGCCTCCCTTCTTTCTCTCTGA
CCACACAGCTGGTACATAGTCAGTACAGACGCAGTCAGTGAGTGGAGCACGGGGCTTCTCTC
CAGGATTCCTGCCCCTTTGTTTATCCCTAGTCTCAGGACTCCCTACTCCTGGTCTTCTGCCTAA
ATCTGTGCCTCTTGGAAGTGAAGCCTCCGTTCCCAGTGGGGCCAGGTCCTGACCCTTGGGAA
CTTGCAGGATCCCTCCCTTGGGCCTCTCCCCGAAGCTTCCAGCTCAATGCTGACCAGAGCAC
AGGCTGCCTGTGACAGTCCTTGGGGTGACCTCCCTTATCAGGAAAAATGCAGAAAACCTATT
AATACCTTAGCCTTGTGATTGTTAATGGTCACAAAACTCCTTTAGGGTCCTTTGGACTCAGCA
CCTTTATGGTCTCACTTTGAATTTTGAACCTCCCACCTCCCCCCATCCCCCAGAGTAAGGCAA
ATGGTCTTCTGATTGTTCCTGCAGAGGGAAGGCTCCACAGGTAAGCACACGATGGCCAGGA
AGCAGAGCTGGAGCCTGCCTGAAAGGCTGTGGAGAAATGGAGGGAGGGCTGCCCTGAGGAC
TCTGTCTGGCTTTGAAGTTTTCTACTGTTTCCTTTTCTTCTGTGCACTGTTTTAGGATGATGGG
GTGATAGTTCCAGGCTGGTTGAGGATGGATTTGGAGACAGTCCTTTGTACCCTCAGTGAGCA
AGAGTATCTGTCACCCTACCTCAGCAGTTGTCTCTGTCACTGGTCCAAGCAGCTGGTTCCTAC
ACAAGGTCAAGATCAACTGGGGAGAAGCAGACTCCTGGGTCTATCCCATTAGTGAGGACAG
CTGCCTGGGCTTATGGCCTCATTGGTTTGGTTTCTATCTTGATCATCTCTACCATCCCCCCATC
CCGGCCTTCCATTTTCTACCTCAGCTGTCAGTGCACAGATTGATGTGTGTGGGAACGGAGCTT
GGGAGGAGTGGGGTAGGGCTGGTCCTGTCCTGTAGCCTCCCCTTCCTTCGGGCACTTGGACC
CTTTGGAGCTTGCCGGGGTGGGGAATGGGAGTGGGAAGGCCAGGGAGTGTCTCTGCACCAT
CACTGTTTGAGTGTTGCCCCTTTGCTGTGTGCCCCACCTAGTCTATGTGTGTCTCTGTTCTCTG
GGGACTCAATTTGCTGGTGAATTGCTTCCATGGACATTGTTCTGGGAAATGCCATTTTTTCTG
CTCACCCATGACTCTGTGACAAGGAATGACAGCTTATTAGGAATTTGTTTTTGCATTGGAAC
AGTGGTCATCAGAATGGGCCCCTTTTCCCTTGCAGCTTTGACATTTGCCTCTCTTTTCCTCACC
TCTCTCCCTTGCATCCACCCTTTTCTCTTTTTCTTCTTTTTTGTTTTCCTTCTAGCAGGGGCCTT
TTACCTTTACTTGTTAATCCTGTTTGTAGCAAAGCAAGTGGAAGGAGGAGTTCCTCTCTGATC
TGCTTCTTATTCTCCACCTACCTTCTCTTCTGTACTTTCCGCCTCCTAGAGAGAGAGAGAGAG
AGAGGAATGCCGACCTAACTACCGCTGCCACTGCTGCTGCCACCACCGCTGCCACCACCACC
CTGGTAATGTTCACATGTCCTCAAATCAACCCAGAGCCAGGGCCCTGCTGGTCAGGGGGAGG
CTATGTAAATAATCCCATGAGTGTGCCATCCTCAGGCCCTGGGGTCTCCTAGGCAAGACCAG
GGCCTCTGTGGGCTCTCTCGGAAATGCTGAGGTTGCTGGAAGCCAGCCCGTCATACAGGGTC
TGAGAGTTTAACTTCTTTTAAATTAAACCACAGTTGAGCTCATGCTGTGTGTGTATAAACTTT
TGTATCCTGCTTTTTCCTTAAATTCTTTATCATCAGCATCTTCCCATGTTATTTCATAGTCTTC
ATCATCATCACTTTCCATACCTTCATAGTAGTTGATCGTAGAATTCCATCATAATTAACTTGT
CTTTTCTCTCTTAGAAGTCCCTTAGGTAATGTCCAATTTTCCGTGAGTGTAAGTAATACCATA
ATGAACATCTTGGAGTCTGAAGTTTATTCTGTGTTGGTTTGTTCCACATTTAGGATCATTTTC
CCAGGCTAGATTTTCAGATGTGGGATTATGGGTTCAGATATGGTTTACACATTTTTATAGTTC
TTAATACAGATGGCCAAATTGCTTTCTGAAAGAGAAGCTTTTCTTAAGTATTTTTCTCCAACT
TGTATCTTAAACATCCTGAACATGCTTAGCACCACTGTCTTGATATATCTGCGGAAAGCCAC
GTCTCCACTTTTCAGTGTGTCGGGCCCTGGGAGAGGCAGGCATCCTGCGCTGGCTCCTTGGA
GCTGGGTTTAAAATTGTCTCCTCTGGCTGGGCGTGGTGGCTCACACCTGTAATCCCAGTACTT
TGGGAGGCCGAGGTGGGCGGATCACTAGGTCAGGAGATCGAGACCATCCTGGCTAACATGG
TGAAACCCCGTCTCTACTAAAAATACAAAAAATTAGCCGGGCGTGGTGGCGGGCACTTGAA
AAGTCCCAGCTACTCGGGAGGCTGAGGCAGGAGAATGATATGAACCCGGGAGGCGGAGCTT
GCAGTGAGCCGAGATCGCGCCACTGCACTCCAGCCTGGGCGACAGAGTGAGACTCCATTTTA
AAAAAACAAACAAACAAAACAAAAAAACAAACAAACAAAAACTGTCTCTTCTGTGCTCACT
TCACCCAGAATCCCTGTTGGGCTCTTCAAGGAGCTCAGTTCTCTCTGAAAGCAACTTTATAGC
CTCAGTCCAGTCTGTGTTCCTGTGTGGCAGGGGTCAAGGGTATGCTCACTCTTGAGAGTGGT
GTCTTTGGTTGACCAAGAACCACTCCCATAGCCTGGTCCCTAACCCTTGAAGGCCCATCTCTC
TCACTCACTGGGGTGAAGAGTTTAAATCTCAGATCCAAGTTTTGTTGAGAGCTCTGAGCTAC
CATATTGCTATGGTTAACAATAGTTAACAATGTTAACAATGGTTAACTATGGTTAACAATAG
TTAACAATGTTTAACAACTAGAGCCCAGCTGGGTGTGGTGGCATGTGCTAACAGTCCCAGCT
TCTCAAGAGGCTGAGGTGAGAAGATTGCTGGAGTCCAGGAGCTCAAGGCCAGCCTGGGCAA
CATGGCGAGACCCTGTCTCCCCTGCAAAAAAACAACAACAACAAAAGCAAAACTAGAGCCC
AACTGCTGTGAACTCATGGCTGAGTAGATATTATTAGCCCTCCACAAACTCAGCATTTGTAT
AATCCCAGGCTGTTTCCAGTAATTCTCTGGGGATCATCTCCCAGCCTGTCCACTGTTCCAGGA
TCCACACTTAGGCCTATAGGAATGCCCCGTCAGAGCTTCTGCTGCCGCTGATCTGTTACTGTT
TCATGCAACCCACTCGGCCTAGTTCCTTCCTCTTACTGTCTCAGTGGGCACAGAAAAGCATA
CAGAGGGTGTTTCAGCAAACATTGCCACTGGCTGCAGACCTGCCCCCGGATCTGTCCTGTTG
AGAGCTTAGTGCTGCGTTCTTGCATGGTGGGGAGGGGTGTGGCTCTGTGATGAGCCAGGGCA
TGTGTATAGGAGCAACAGTGTCTCTCTTATCACGTAGAAGTTCTGACTCATTGCGAGTCTTGG
CTTTGGGTTAATGGTTCCAGCCATGTTGCTGCTGTGTCTTTTGGTGCAGGAGAGGCTGGGCAC
AGTTGGTCCCTAAGCCATTATGGATAAGGGATGTGTCTGCTGATATACACACATGGACCTGA
CATCCAGGGAAGGCAGGGTGATTGGACAGAACAGTTCTTCCAGAAGCTGTTGGAACTTGGA
CAAGAGTGGCCCTTGGCTTTCTGTAGTTGGTCATCTGTCCCCTGTTGCAATCAGGGGAAGGC
CACACTTGCCTTCCTTAACCACAGTTAGGATTTTCTTGGGGATTAGACCAGATTCTAGCACCT
GTCCTGAACCTCTCGCCCCGCCCCTACAAAGGCTGCTTGCAAGTGTAGTGCACATACACAGG
GAGCAGGTGGGGCATGGAAGTGGAAGTGGAGCCCCTGCCTTTGGCCCTTGGGGGAGGCACT
GTCTGCTTACCCACGGTTGTTGCCTCATAGGAATCATACAACAGCTTCCTAACTGGTCTCCTT
GCCTTCAGTTGGATTGGGGCACAAATCCCTCCTTGACATATAAACCATGGTTTAAGGCTCCC
TGTGGCCTAAATAAAGATAAAGCTTAAGTATCTTAACAAGCACCTAACCCTTCTCCCCAGCC
TCGGTGATTTGGCTCATCGCTGCCTTCATGTTTCATTCTGGCTTCACTCATTCGGAATTTCTTG
TAGTTCCTTGGCTGTTCTCTTTTCCTTACCGCCTTTACAAATGCTCTCACCATGCATGCTTTTC
TCTGCTCCTACAGATGCCTTCTCTCCCAGCACCGCCTCCAGAGTCTATGTCTGGTCGATTCTG
TCTGCTGTCTCCAGTCCCCATCTTGTGGCAGTCTCTGCTCAATCATTTGGGGATTTTATATGTT
TTCTGGCCTTTCTTTTGGGGGCCTGTCTTCTCCTTCTAAAAGCAGCCAGTTGACCTAGAAGGA
AGGGATAACTGTAACTCTTGTCTACCAACATAAGATTAGGCCCACCCTTTAAAAGCTGCGTC
TTTGAAAGGGACACCTGCACCCAGCATGCTGGCTTCTCTTCACCAAGCGTGACTTCCTACGC
ATTTCACAGGCCTCCAGAGGTCCCCCTGACTCTCTTCTGCTGTGAGAAACTCTAATCATGTAA
GCCACAGGCTAATTCCCTTGAGCCTTAAATGTTTTTAGTAATTTCCCATTCATCAGAGAAGCA
GGATTTGGGAGGAATTTTGAAGCAAACACTACAGAAGGCAGAGTCTCCAGGTAGGATATCT
AAGAGACATTTGGAATGGTCTGACTGTTCAAGATGGATGGGAAAGCCTCTTCCTGTAATGAT
AGTAGCCAACATTTGTTGTCAGGCAGTGGGGCCCCATTTTTGAGATGGGGTCTCTGTCACCC
AGGTTGGAGTGCGGTGGTGCTGTCATGGCTCACTGCAACCTCAGCCTCCCCGGGCTGGGTCT
TCTTAATTCTGAAAAACCCAGCTTTTAAAGGGTGGACCTAATCTTATGTTGGTAGACAATGTT
GTCTCATTTAATACAATGCACATGCTCTCCCCATAACACAAAAGAGGGAACTGAGGCCTGGA
GGTGTGATGTACCCCAAGTCACATAGCTAATAAATAAAGAAGCCAGCATTCCTGGGATTAA
AAATGCATGTGTCTGTCACTGTGGTGTATTTGGTGCTTGATCAATGTTTACTTGAGCAAATGG
AGGGGCAGAGGTACCGATGAGTGTGCTCAGTGAGGAGGGCAGGAGTGAAGCTGGGCGTCTT
CCCGCCTCTTGTGAGTGGTGGGGCTTGGTGAGCTTGCCAGGGCCTGTCTTTCTTATCAAAGA
AGGTGTGTGCCCCAGTGTTACAGCATTTCACCCAAAGCAGCCTAGAAAATGCTTGACTTTTC
TGTCATTCCGGGGAGGACACTTTCCTCCTCCACTGTTCTGCTGGCCTGGTGTACCCACGGCCC
CTGATAGATGATAGCACCTGCTAAAGTGCACCATGCCCTTCCGTCTCACTGCATCCCACAGA
TGAGGCCAGGCTGGGATGAGGGAGAAAGGGAGGGATATATAGTTCAGGTTATTTTGGAAAA
CTGCCTGACCAATTTTAAGTCTGGGCCGGACACTGGGGCATCTCACCACGTTGAAAGGGCCG
TGGCACCCCGGGCGGTGAAAGGGGCTGGAACCAGGTCTGCTTCTTGGGCTTCTCCTCCAGGG
TGCCATTGCTCATGGGCCTTGGCTGCAGAGGTGCTCATTCGTGGTTCCAAAATTCCAATTCCT
GGGAGAGGAAAAATGCTTAGTTCAGTCTCAGTTAGGCCTCTGCTTAGATCAAACAGCCAAG
GCCAGTAGGCCCAGTCCTATGGTAGAGACATGGCCTCAAAGAGCCCTCTGCTGCAGTTGTTG
GGGAGTGTACCAAGAGAAGGGAGCATTGTCCTGGGCTGGGCAGCCCTGGGGGTCTAGTGCA
TAGATGTAGAAAGGCTCTGTTGGTATACCTCCCTTTGCTTGTTGGAAAGTGCTCAACGGGGC
TGAATTGTGTTTGACAGTGTAAGTCTGGGCTGGGGTGAGGGTTGTTACAAGATTGTCAAGAT
GATTAAATGAAATGCCATTTGAAACACTTATCCATGCCTTGTGTATGGTATCCCCACCAGTG
AATATTCACAGTATATTATAATAATTCCAACAACTTCATAATTTTCATATGCAATTTCTAAAC
TTTGAACTTTTTTTTTTTTTTTTTTTTTTTTGAGACAGTGTCTCGCTCTGTTGCCCAGGCTGGAG
TGCAGTGGCGCAATCTTGGCTCACTGCAACCTCCACCTCCCGGCTTCAAGTGATTCTCCTGCC
TCAGCCTCCTGAGTAGCTAGGAATCCAGGCGCCCGCCACCACACCCAGCTAATTTTTGTATT
TTTAGTAGAGACGGGCTTTCGCCATGTTGGCCAGGCTGGTCTCAAACTCCTGACCTGAGGTG
ATCCACCGCCTTGGCCTTCCAAAGTGCTAGGATTACATACGTGAGCCACTGTGCCCGGCAAT
TTTTTGTGTTTTTAGTAGAGATGGGGTTTCACCATGTTGGCCAGGCTGGTCTCGAACTCCTGA
CCTCAAGTGATCTGCCCGCCTCAGCCTCCCTAATGCTGGGATTACAGGTGTGAGCCACCACG
CCCAGCCTAAACTTTGAATTTCTTTGAACCCATGACTTACACAGAATTAGCTGAACGCAGAA
TTCCAAATCAACTCAGCCTGTGGGACAGCCAAAAAACACAGTGTGCCTTTGGGCTCCTTCAC
TCACCACGCGGGGTTAGAAAACTTTGTCAGAGGCTTTAAAAAAGGAGCTCTTGTGTGTAAAA
TGTTTCCTTGATTCTCTTTCTGGTGCCTCTCTTTCTCTAAGTGGTTTGCTTCCCCAAGTTCCCC
ACCTGAGTCTGGGTGGCTGTGGCACATCTGTGCATTCTGTACGCACACAGGCAGCCTTTTGG
AGTGCCAGTTTCCAGGTCTTGGTTTTATTTATTTATTTATTTATTTTTTTGAGATGGGGGTCTC
ACTCTGCCGCCCAGGCTGGAGTGCAGTGGTGCCGTCATGGCTCACTGCAACCTCAACCTCCC
TGGGATCAGTTGAGCCTCCTACCTCAGCCTCCAGAGTACTAGGGACCACCATGCCTGGCAAA
TTTTTGTAATTTTTTGTAGAGGCAGAGTCTCACCATGTTGCTCAGGCTGGTCTCGAGCTCCTA
GACTCAAGTGATCTGCCCACCTTGGCCTCCCAAGTGTTAGGATTACAAGTGTGAGCCACCAT
GCCCAGCCCAGGTCATCTTTTGAGGGCATGGAGAGAAGACTTTGAGCATCCCACTTTTGAGA
TTGTGTACCAGTCGCAAGCCCCTATGACACACTTTTTCCCCAAAGTAGAGGGCTCTGACTAT
GTTGATCCCAAGAGAGATGGGAAAGAGCATTGAATGAGGATTCCAAAGTATTGGGCCTTAG
TTCGTTTCCTCATGTTGGTGTTGTGAAGATTCTGGTTAGGATAACAGCATGTGTGCAGGAGG
CTTTGTGAACTGCTGAGAGTGAGGCGTGGCAATGTCAGTGCTAGGTTTGTCCTTACTAACCT
GGGGCCATGGGAATTGATAAGACCAGATTCCCAACTCTACCCCACAATGTGATCCCTGTGGT
GACCCCTCACAGGGCTCTTTGGTCGAGCTTCCCAGAAGGGATCACCATCTGCCATTGTATGT
TGAACCCCATTCATTCATTCATTCATTCAGCCAACCAGCAACTATTTGTTGAGCTCTTATTGT
GTGAGAAGCAGTCTTCAAGGAACTGGGTGAATAAAAAAAACAAAACATCCTAACCTTCATT
GAGCTTACATTCTTACTGAAAGAAAACAAATAAAACATACATGTAATCCTAGCACTTTGGGA
GGCCAAGGCAGGCGGATCACTTGAGGTCAGGAATTTGAAACCAGCCTGGCCAACGTGAAAC
CCATCTCTACTGAAAATTAAAAAAAAAAAAAAAAAAAAGCCGGGCATGGTGGCACATGCCT
GTAATCCCAGCTACTCGCGAGGCTAAGGCAGGAGAATCGCTTGAATCCTGGAGGCAGAGGT
TGCAGTGAGCCAAGATCATACCATTATACTCCAGCCTCAGTGATGAAGCAAGACTCCATCTC
AAAAATAAAAAATAAAAATAAAAATATGCATTCCCTTTGCACCAGCACACTTGGTGCCTGG
GGACCTCGTGGTTGGCACCCTGAAGCAGGTGTCCCTCTTCTGTCTTGCACACCTTGCTTCTGT
CCTGGTGTGTATGGCATGGCCTTCTGCCCTCCATGGTGAGCACTGTGAGGGCAGAGGTTGAG
TTGGGTTTGCTGTATTTCTCAGGTGCCTAGGTTTGTGCTTGACAGGTAGATGGAAGGCACAC
AATGTGGTCATCAAACCTCAGTCAACCATATAAGGAAGGTAGAAGTGAAAAGTCCCATAGG
TACCCAACTAATGTCACCAGTTTCCTGGATACCTTTCCTGGAGTTTATTTATAGTGTGTATAA
ATAAATGATGTATGTGTTTAAATGCCTTTTTCACCTTTCCTTTTAGAGCTGCCTCTTTTTAACA
GTTCCATTCCATTGTATGGATGTACTATGATTTATTGAACCAGTTCCCTACTGATTATTCTGTT
TTTTGCAGTCTTTTGTTATGATGAACATTCCACAGTGACAATGTTGTTCATAGTCATTCACAC
ACATGCAAGTCCTTCTGCAGGATATATTTCTAGAGGGGAATTGCTGACTCAGAGGTTTTGGT
ACTCTGTGTTGATTGTAGAGTGACGGCAGAAAAGTGAGGCCCAAGAGTTTCCTAGTGACCAT
GTGTAGTGGACAAGTCACCAGTCCCTGTGAGTGTTTGGCCCAAAGGCTTTAAGGCATTTGAT
ATCACTGTTTTTGTTTCTGCACCAGGCGGGAGACACTATATTCAATCGTGCTAAGCTCCTCAA
TGTTGGCTTTCAAGAAGCCTTGAAGGACTATGACTACACCTGCTTTGTGTTTAGTGACGTGG
ACCTCATTCCAATGAATGACCATAATGCGTACAGGTGTTTTTCACAGCCACGGCACATTTCC
GTTGCAATGGATAAGTTTGGATTCAGGTAAGAGATACTCAGTCAGAATCTGTGGTAAACATG
TCTCTCTCATGTGTTGACTAGGAAATGCAGTCCTGGCAGCTCAAGAGTGCCTCTTTAAGCTCT
GGAGCAGAATGCCTCCTCTGAGAAATGGGTGCTTTGTATTAGTTGAGATGGAAAGAAGAGA
CCAGAAATGCCTGTAGTCTCTGCACATCCAGACAAAAACAAATTTTCCCCCCTTTTTTTTTTT
TGTTTGTTTTTTGAGACAGGGTCTGGCTCTGTCACCCAGGCTGGAGTGCAGTGCCGTGATCTT
GGCTCACCGCAACCTCTGCCTCCCGGGTTCATGCCATCCTGTCACCTCAGCCTCCTGAGTAGC
TGGGACTACAAACACTTGCCACCATGCGCAGCTAATTTTTGTATATTTTGTAGAGATGGGGT
TTTGCTGTATTGCCCAGTCTGGTCTCGAACTCCTGAGCTCAAGCAATCCATCTGCCTTGGCCT
CTCGAAGTGCTGGATTATAGGCATGTGGCACCATGCCTGGCCTAAGAACAGTTTTTAGCATT
TGGGAGGGGCTCTCATCTTTAAGCTCCAAATGATACTGTATTTTCTTGCTTTTTTCTTTCTCTT
GCCCCACAAGTTTTGGAAAGTAAATTGGAATAGTTTTCCCCCACTGAATTATTTAGCTTGTAT
ACCTCAGCAGATGTTCCTTGGCCTGTTTTGTTTTGTTTTTGAGACAGGGTCTTGCTCTGTCACC
CAGGCTGGAGTGCAGTGACACAATCATGGCTCACTGCAGCCTTGACTGCCTGGGCTCAATCC
ATCCTGCAGCCTCAGCCTCCTGAGTAGTTGGGACTACAGGCATGAGCCAGCATGTCCAGCTA
ATTTTTTATTTTTAGTGGAGATGAGGTCTGGCTATGTTGCCCAAGCTGGGCTTGAACTCTTGG
GCTCAAGTGATCCTCTCACCTCAGCCTTCCAAAGCATTGGGATTACAGGTGTGAACCACTGC
TCCCGCCCTTGGCCCTATAAGAAGGAATGTGATTCTGTTTTCCAGCAGGGCACAAACTTCTG
CTTAAATACAAAGCCCAAATTTTTCCACCAAAATGCCCCTAGTGAAGTGGCCAGCCCAGATG
CCCGACTAGCGTATTATCCAAAGCATATTGTCATTGGTGGAAAATGGCCTTATAGTCCATTG
TTTTGTCTTAAAAGTAAATATATAAATAAACTTGTATATTGTTTCCTAATTCCGTGTTTATATT
AACATAAAAGTGTTTTAAATTACCTGTCAGTGGCCAGGTGCAGTGGCTCGTGCCTGTAATCG
CAGCACTTTGGGAGGCCGAGGCGGGCAGATCACCTGAGGTCAGGAGTTCGAGACCAGCCTG
ACCAGCATGGTGAAACCCTGTCTCTACTAAAAATACAAAAATTAGCCAGGTGTGGTGGCAG
GTGCCTGTAATCCCAGCTACTCGGGAAGCTGAGGCAGGAGAATTGCTTGAACCCGGGAGGC
AGAGGTTGCAGTGAGTTGAGATCGCGCCATTGAACTTCAACTTGGGCAACAGAGCAAGACT
CTGTCTCAGAGAAAGAAAAAAAAAAACCTATCAGTTGAATAACAAAACCCTTTCCTTCCTTG
CTTTAAGTGAATCTGAAGATCCAGGAGCTGTGCTGCAGGTACCCTCTATGTTGGGTACCCCT
GGTTTAGGCTGACTAGTACAGTGTGGTTGGCTCATGTAGACAGCAGACCCTTTATTTTAGAT
ACAACTTTTTTTCTTTTTCTTTTATTTTTTTTGAGACAGAGTCTTGCTTGTCACCCAGCCTGGA
GTGCAGTGGCGTGATCATGGCTCACTATAGCCTTAAACTCCCTGGCTCAAGTGATCCTCTCA
CCTCGGCTTTCCTAGTAGCTGGGACCACAGGTGTGGGCCAGCACCCCTGGCTGATTTAAAAA
AAAAAAAATTTTTTTTTTTAGAGATGTCTCACTATGTTACCCAGGCTGGTCTTGAACTCCTGG
GGGCTCAAGCAATCCTCCTGCTTTGACCTCCCAAAGTGCTGGGATGACAGGCATGAACTACT
GCACCTGCTGAGATGCAACAGCTTTCTGTCAGACTCATTTTATTCTCATCATTTCTTCCTGTCC
TCCCTTGCTGGGAGCATGAGAGCTGTGATGGGAATATAGGAATGTATGAAGTCCTTCTCCCA
GATCAAAAATCCTAACTTCTTGTCTTAAAGGGAGGAAAATTTGAATGTAACCTTACTTTTAG
ACTCTTCAGAAATCCTTCTATACCCTTCCGTCCCCGCTTTCACCCTTCCTCCCTCTCCGTGTGT
GTATCTTCTTCTCTTGAAACACACAGGTTTATACCCTGACCCCTCTTGATTCATCCCTTGAAG
CACAGTGGTGAACAAGGAAGGGGCCCGTGATGCCCTAATTCTTTGCCACAGCACCATGTTTG
TTTCACAAGGAGCCTGGCAGGTTTGGGCTTGGGGCAGATAGGGGAGAGAAAGCAGCAGAGA
CAGCAAAACCAAATCATGTCAGCTTGGCATGTACTTCCCTCTGAAATAGCTAAGAATCCATT
TCTGTAAAAGCACTGATTATCAGAAAACCTTATTGGCCTGGCCACCTTTGGTTCAAACCCTC
ACATTAATAATGTGGACAGTAGTATGAGGTGTGCCAAAGGTGGATGACTCAGCACCTAAGT
GATGACACCTAATTACGAATAGGTTCATTAAAGCAGACCCCCTGGGGACCTTTGCTTGAGGA
TCCTTACAGTCAGAATTCCTGAATATATTTGAAAATAATAATTGCATCTTTATTTTCATATGT
TCTGTATGGTTTGGCTGACTTCCCCCTCAAAGTCTGAGTTAGAGTTTTCCTTAATTTATGTGA
TGGGTTTGGTCTTTTTGGATTCCAGAAAGAGCTGGGTGTGGTTTGGAGCTGCACTCAGAGTC
ACACAAAACCACAGCCTTTAGAGAACCCACAGGAAGGCTTTGGGGCACGTCCTGATTCTTGA
CATTTCTCATCAGTGCTGACTTTGTATCCCTTAGGAGTTCACAATTCATAACCACTGAAATAT
TAAAATACAAAAAGTTTTGGAAGGATGAGAGCCCAGATGCTCTACTACTTGAAAATATGTTA
AAACATAAGTTCATCATTATACATTTTGCTAAATCAGGATAAAGTCTGAAGTTTCAAAGAAG
TTTTATTTTAGCAAATTTTCAGAAACACTGCCTCAACTGTTAGGGCCAGTGTTCTAGTCAGTA
TGCCTTTGGAAGCATGAAAGCTGGATTGGTCGATAGGATGGGTGTGGAAGGGGGGCTGTGA
CTGGGTGGGTACAGAGAGGCTCTGAAACAATCTCAGATTCCAGGAGTTCCTGGATAAGGAC
TTCATGTGCGGGAACAGAGCACAGGAGAAGCAGATTCCTGAGCCACTCAGGAAGAACTGGG
CCTAGGCCTGCTCTTGTCACTGACTGGCTTTCTACATAACCACAGAAACAGCACTGTGTTGTA
GAAAGAGGAAGATCATACTTTTTGATATCTGTGTCTAATTTAAGGTCATCTGAGCCCTGATA
GAAAAGCAAAACAGACAAAACCCTTGTAACTGCTCCCTCCCACCCCACCCACCATCAAAAA
AGCTTTAGAGAGGCTGGACATGGTGGCTCTTGCCTGTGATCCCAGCACTTTGGGAGGCTAAG
GTGGGTGGATCACCTGAGGTCAGGAGTTCGAGACCAGCCTGACCAATATGGTGAAACCCCA
TCTGTACTAAAAATACAAAAATTAGCCAGGTGTGGTGGCACACGCCTGTAGTCCCAGCTACT
TGGGAGGCTGAGACAGGAGAATTACTTGAAAACCTGGGAGGCGGAGGTTGCAGTGAGCCGA
GATCACGCCATTGTACTCCAGCCTGGGCTACAGAGCGAGACTCCTTCAAAAAAAAAAAAAA
AAAAAGATCCGGTTTGGTGTCTTACAACTGTAATCCCAGCACTTTGGGAGGCCGAGGCCGGT
GGATCACGAGGTTAAGAGATCAAGACCATCCTGACCAACATGGTGAAACCCTGTCTCTACTA
AAAATTAGCTGGGCGTGGTGGCAGGCGCCTGTAGTCCCAGCTCCTCAGGAGGCTGAGGCAG
AAGAATCGCTTGAACCCGGGAGGCGGAAGTTGCAGTGAGCCTAGATCGCGCCCCTGCACTC
CAGCCTGGCAACAGAGCAAGACTACGTCTCAAAAAAAAAATAAATAAAAACTCTAGAGAAG
CAAAAAGAATAACTTTAAAAGTGTTTATGTTCTCAGCAAGCTTTATTTTGGGGATGTCAGAA
CTTAACTAACCACTGCTCCTTCTGTGTGTATGTTTTTCCTCCAGCCTACCTTATGTTCAGTATT
TTGGAGGTGTCTCTGCTCTAAGTAAACAACAGTTTCTAACCATCAATGGATTTCCTAATAATT
ATTGGGGCTGGGGAGGAGAAGATGATGACATTTTTAACAGGTAATGGTCATAACTTAGATAT
CTTTCTCCTCTGTCAACCTTCACTTCCAGTTTTTTAACCAATGCTTGGTTGTTCCCCAAGGACT
GACCCTCAGATGGGATGCACCCCTAGTCAGCCCACATTCTTAGGTGTGGCTTCCTACAGGTC
CTGCAGGTGCTAAAAGGGATCTGTAGGAAAATGAGTTTCTGAGATTTTTGTATTGGCCTGGA
AAAATGTCAAATGGGAACCAAGTGACGGGGCAAGTTTACTTTGACTTGCTGCATGCCGTTTT
GTACTCAAGGAGTAAACCAATGTCCTTTGTAAAAATCCCTCCTTTCATTATGGTCCCCTTTCA
CTGTGAAACAAGTTTCCTTGAGCAGAATCCTAACTGTCTTCACAGAAGCTTTGTGTTATATTT
TTATTTTGGAGTATTTTCACATATACAAAAGAGATACTGTAGTATAATAAACCTTTGAGGAC
CTATCCAGCCCCAGCAACCATTATGGCCTGGTCAGTTCTGTCCCATCCACATCCTGGGGCTCT
TTTTAAGCTGGTAAATCATTATGATGTGGGTTGTCATTTACAGTGGTAAAAAACATCTATCA
GTAGCATTTGAAAGAACATTCTGCTCAGTCCTCTGGCTGTAGAGGCTTCAACCCCACCAGCC
ACCGATGAGCACCTTCTCCCTCCAGGAGCCAGTCTGAGCTCATTACTGAGTTTAATATCAGA
ATACACCCTGGTGCAGCCTTTCTAAATTGCAGTACCAGTTAACAGAAGGTGTCTGTCAGAGC
AACACCCAAGTCATTCAAGTTACCATTGTGTGCAAACTTAACAGAGACCCACGTCTTCAATA
TAAGCCTTGAAGGAAACTCCAGTTTTAGTATGTAGATGGGGTATCAAGTGTGTGCACATTGA
ACATCTGCTGCATACAGAGCACTGTGCCAGGCAGGCCCAGGACACTGAAAACCTGGACATA
GGGTCCAGACAGAAGCAAGCCTGCTTCCACAGAGGCACTCCTGGGCAGACACTCTGGACTG
ATATGACAGTGTGCAGGGCCGACAGGATACCACAGGTCTGAATGGTCAGAACAGCTGGGGA
GGGAGGGAGCATCCGCAGGCATCTAGTCCCATGCTAACGCAGTGGCACTAGAAGGATGGGT
GGTGTGTGGAGCAACTTTCTTGAAAGATAAAGGACCTAACACTTTCTATGCACCACTTACTG
TGTGCCAGGCAAGGCCAGGAATGTTTAAGTGGTCTGGGATCAGCCAGTTCTGCCTCTTAACT
AACTTTGCTGTCCTGCTCTCCAGGCTTTCATTTTGGTCCTCATTCCTTTTCCTTGGACCAACAC
AGAATCCTCCACCCTGTTCTGGCTGCCTCTAGTCTTGTTCTCAGCCCTCCATTTGTTTTTTTCT
GCCTTTTCCCACATGTTCTGAAGCCCTCCATTCGTATACTACTTTCCAGAGACTTCCCCATGG
CTAAAAGCATTTTGGAAATACTGTATATTAGGCCCCTTTCAGATACTGGCAACCGTTTGTGG
GATGCTCTGAGAAGGCCTCTGTGACTTAGCCTGGCCCTTTTCAGCCCATCACCTGCCACGTCC
TACCCCAGACCCTTGTCACCAGTCCCCAGGAGCTTACGTTGCTCCCTGAGGGCACTAGGCTT
GCTCTCACTTCCATGCCTTTGCCTGTGCCATCCTGGCTGCCCAAAATGCTATGGCAGATACCT
GTTCATCCTCAACTGGGCTCTGCCTAGGCTTGCTCCAGCAGAGGTTACAAACTCTATGCTTCT
TCCTCTGTGTCTCCAACCTCATCTTCCTCTTCTCACCTCCATCCTGGCCCTAAAGGCCCTATGT
TTGAAGCATTCACACTGTATATTCTGTGGGGCACACGGCCCCAGTGTCTGGCACATGGTAGT
CAACACCACAAACCGCAGAACCAGTTGTAAAAGGACATGGAGTCGGAATGTGAGTTTTAAC
CAGGGTCATGCTGGGCTGGGTTCTGGCATGATGCTGGGTTGTGGGCTGAGTGAGAACAGCA
AGGGTGATGGTGGATGGAGCAACAGTCTTGCAGCCGGGGCTCTCAGGCCAAGTGTATGGCA
GCTCTGTGATAATGACTTTCCCTTTACTCTTTGCAGATTAGTTTTTAGAGGCATGTCTATATCT
CGCCCAAATGCTGTGGTCGGGAGGTGTCGCATGATCCGCCACTCAAGAGACAAGAAAAATG
AACCCAATCCTCAGAGGTGCATTCTTTGTTTATTCATACTCCTTCCCCCTTTAGGATGAGGTA
GGCTGCAGGTCCGAGGCTCTGGGCCTAGAGGGAAATTGAGGTGGTCAGGTTACAGTGGAGA
GGGAGGAGGAAGTACGTGTGATGATTTCTTCTTAAGATTTTTGTTTTAAGACAATCTCCTTGT
GCTCTTTTCCTTGTAGGTTTGACCGAATTGCACACACAAAGGAGACAATGCTCTCTGATGGTT
TGAACTCACTCACCTACCAGGTGCTGGATGTACAGAGATACCCATTGTATACCCAAATCACA
GTGGACATCGGGACACCGAGCTAGCGTTTTGGTACACGGATAAGAGACCTGAAATTAGCCA
GGGACCTCTGCTGTGTGTCTCTGCCAATCTGCTGGGCTGGTCCCTCTCATTTTTACCAGTCTG
AGTGACAGGTCCCCTTCGCTCATCATTCAGATGGCTTTCCAGATGACCAGGACGAGTGGGAT
ATTTTGCCCCCAACTTGGCTCGGCATGTGAATTCTTAGCTCTGCAAGGTGTTTATGCCTTTGC
GGGTTTCTTGATGTGTTCGCAGTGTCACCCCAGAGTCAGAACTGTACACATCCCAAAATTTG
GTGGCCGTGGAACACATTCCCGGTGATAGAATTGCTAAATTGTCGTGAAATAGGTTAGAATT
TTTCTTTAAATTATGGTTTTCTTATTCGTGAAAATTCGGAGAGTGCTGCTAAAATTGGATTGG
TGTGATCTTTTTGGTAGTTGTAATTTAACAGAAAAACACAAAATTTCAACCATTCTTAATGTT
ACGTCCTCCCCCCACCCCCTTCTTTCAGTGGTATGCAACCACTGCAATCACTGTGCATATGTC
TTTTCTTAGCAAAAGGATTTTAAAACTTGAGCCCTGGACCTTTTGTCCTATGTGTGTGGATTC
CAGGGCAACTCTAGCATCAGAGCAAAAGCCTTGGGTTTCTCGCATTCAGTGGCCTATCTCCA
GATTGTCTGATTTCTGAATGTAAAGTTGTTGTGTTTTTTTTTAAATAGTAGTTTGTAGTATTTT
AAAGAAAGAACAGATCGAGTTCTAATTATGATCTAGCTTGATTTTGTGTTGATCCAAATTTG
CATAGCTGTTTAATGTTAAGTCATGACAATTTATTTTTCTTGGCATGCTATGTAAACTTGAAT
TTCCTATGTATTTTTATTGTGGTGTTTTAAATATGGGGAGGGGTATTGAGCATTTTTTAGGGA
GAAAAATAAATATATGCTGTAGTGGCCACAAATAGGCCTATGATTTAGCTGGCAGGCCAGG
TTTTCTCAAGAGCAAAATCACCCTCTGGCCCCTTGGCAGGTAAGGCCTCCCGGTCAGCATTA
TCCTGCCAGACCTCGGGGAGGATACCTGGGAGACAGAAGCCTCTGCACCTACTGTGCAGAA
CTCTCCACTTCCCCAACCCTCCCCAGGTGGGCAGGGCGGAGGGAGCCTCAGCCTCCTTAGAC
TGACCCCTCAGGCCCCTAGGCTGGGGGGTTGTAAATAACAGCAGTCAGGTTGTTTACCAGCC
CTTTGCACCTCCCCAGGCAGAGGGAGCCTCTGTTCTGGTGGGGGCCACCTCCCTCAGAGGCT
CTGCTAGCCACACTCCGTGGCCCACCCTTTGTTACCAGTTCTTCCTCCTTCCTCTTTTCCCCTG
CCTTTCTCATTCCTTCCTTCGTCTCCCTTTTTGTTCCTTTGCCTCTTGCCTGTCCCCTAAAACTT
GACTGTGGCACTCAGGGTCAAACAGACTATCCATTCCCCAGCATGAATGTGCCTTTTAATTA
GTGATCTAGAAAGAAGTTCAGCCGAACCCACACCCCAACTCCCTCCCAAGAACTTCGGTGCC
TAAAGCCTCCTGTTCCACCTCAGGTTTTCACAGGTGCTCCCACCCCAGTTGAGGCTCCCACCC
ACAGGGCTGTCTGTCACAAACCCACCTCTGTTGGGAGCTATTGAGCCACCTGGGATGAGATG
ACACAAGGCACTCCTACCACTGAGCGCCTTTGCCAGGTCCAGCCTGGGCTCAGGTTCCAAGA
CTCAGCTGCCTAATCCCAGGGTTGAGCCTTGTGCTCGTGGCGGACCCCAAACCACTGCCCTC
CTGGGTACCAGCCCTCAGTGTGGAGGCTGAGCTGGTGCCTGGCCCCAGTCTTATCTGTGCCT
TTACTGCTTTGCGCATCTCAGATGCTAACTTGGTTCTTTTTCCAGAAGCCTTTGTATTGGTTAA
AAATTATTTTCCATTGCAGAAGCAGCTGGACTATGCAAAAAGTATTTCTCTGTCAGTTCCCCA
CTCTATACCAAGGATATTATTAAAACTAGAAATGACTGCATTGAGAGGGAGTTGTGGGAAAT
AAGAAGAATGAAAGCCTCTCTTTCTGTCCGCAGATCCTGACTTTTCCAAAGTGCCTTAAAAG
AAATCAGACAAATGCCCTGAGTGGTAACTTCTGTGTTATTTTACTCTTAAAACCAAACTCTAC
CTTTTCTTGTTGTTTTTTTTTTTTTTTTTTTTTTTTTTTTGGTTACCTTCTCATTCATGTCAAGTA
TGTGGTTCATTCTTAGAACCAAGGGAAATACTGCTCCCCCCATTTGCTGACGTAGTGCTCTCA
TGGGCTCACCTGGGCCCAAGGCACAGCCAGGGCACAGTTAGGCCTGGATGTTTGCCTGGTCC
GTGAGATGCCGCGGGTCCTGTTTCCTTACTGGGGATTTCAGGGCTGGGGGTTCAGGGAGCAT
TTCCTTTTCCTGGGAGTTATGACCGCGAAGTTGTCATGTGCCGTGCCCTTTTCTGTTTCTGTGT
ATCCTATTGCTGGTGACTCTGTGTGAACTGGCCTTTGGGAAAGATCAGAGAGGGCAGAGGTG
GCACAGGACAGTAAAGGAGATGCTGTGCTGGCCTTCAGCCTGGACAGGGTCTCTGCTGACTG
CCAGGGGCGGGGGCTCTGCATAGCCAGGATGACGGCTTTCATGTCCCAGAGACCTGTTGTGC
TGTGTATTTTGATTTCCTGTGTATGCAAATGTGTGTATTTACCATTGTGTAGGGGGCTGTGTC
TGATCTTGGTGTTCAAAACAGAACTGTATTTTTGCCTTTAAAATTAAATAATATAACGTGAAT
AAATGACCCTATCTTTGTAACTGCAGGTGGTTTCTGTTTGCCAGGTGTAAGGGTTGTCATGGC
TGTGGGATGGGGTGGGGACAGGGTCATTCCCTGGTCTGTGACCCATACAAATACACATGCCT
CCCTGGAATCAGACATTTCCCCATCTGAACTTCATTCTCTTATCTGTAAAATGGGAATAATAA
CACATAGGGACTTTTTTGAGGCTTAAAAGTGACGATATATGTAAAACAATGACTAATGCCTC
ACAAGTACTCACTACATAGTAGCTAGTGCCATTTCAAAGTAGAATTTTTTTCCCCTAGCAGTT
CTTGGGCCACATTCTGCTATTTTCAACAGATACCAGGATCATTCAGATGTAGATCTCAGGGC
CATTTGCACCAGGTGCTCACAGTGTAACTTGAAGGGAATTATCCAAAATGAGGTTTCTTGTC
AGTCTCAGGAAATGTAACCATAAGCTCTAAAAGGTCTTAGTTTTTACCCAGGTGCCTCCTCCT
TGGTGGCCCTGGGTCAGGCTGGTTGGATTGAATTGGCACTCCTGAAGAAGGGCTGCAGGAA
ACCAGTGAGCAGGAGAGCCACCCTTGGCAGGGAGCTGCAGGCCCTGCCTGCATGTCACTGC
TGGAGGGATCCCTGGTGACCTCAGGCCTGTGCAAAGGTGGCCTGGGGTTCAGATCTGGCCTT
CAAACAGGACAACTCTGGTCCTTTGGACAAAATGCTGCCTTAGAGGGTCTGACAAAATTAAA
AACAAACAAAAAAAAACCTGTTTCTTTCCTTCTCACACACCACCACTCACAACACTTCAGTT
CTGCCCCTAGATATGTAGGGATTTCTCCCCACCAACAAGCAGTTTTCTAGTGGACACTAGCT
GGGTGTCCTACAGTTTAACTCAATTCTGACACTGTCTGCCTGGAGATAGCAACGGATCCCAC
AGGTTGAGGGCTCAGTCTCACAAGACTGCCTCCACTGCAGATGCCAGTCACAAGTAGTTGGT
TGTGACCTATGCTTTACAAAAATGTTTTTTGGATACAGGGCCTTGCTGTGTCACCCAGGCTGG
CCTGAAACTCCTGGGCTCACACAATCCTCCCGCCACAACTTAGAAGTAGCTGAGCTGCAGGT
TTATACCACTCACCCAGCTATAGTTGTGACCTATACTTCTGACCAACCAGCTATAAATTGGG
GTTTCTATGAGCCTCTTCTTGGGTTTAATTTGCTAGGTCAGCTTACAGAACTCAGTGTAACAC
TTAACATTTACTGGTCTTATTATAAGTGATATTAGAAAGGATACTGATGAAGAACCGGATGG
AGAGATGCATAGGGCAAGGCATGGGGGAGGGGGAGAGAAGCTTCCATGCCCTCTCCAGGGG
CTCCACCCTCCAGACACCTCCACGTGTTCAGCTATCTGGAAGCTCATCTGACCCTGTCCTTCT
GGTTTTTATGGAAGCTTCATCACATAGGCCTGATAGACTACATCATCGGCCATTGCCAGTCA
GCTCAACCTTCAGCCCTTTTCCCCTTCCTGAAGGATGGGAGTGGGACTGAAAGTGCCAACCT
TCTCATCATGGCTTGGTCTTTCTGGTGACCAGTCCCCATCCAGGAGTTCACTGAGAATCATTT
CATTAAAACAAAAGACGTTCCTATCACCCGGGAAATTCCAAGGGATTAGAAGCTCTGTCAG
GAACCAGGGTCAAGCACCAAATATTAGAACAAAAGATTCTCCTAGCATAAATATTAGAACA
AAAGATTCTCCTAGCATAAATATTAGAACAAAAAATTCTCCTATTGCTCAGGAAATTATAAG
AGTTTTAGGGGCTCTGTACCAGGAACCCAGCGCAGAGGCCAAATATATATATTTTATTATCT
CACAGTGCCACACAGGACTTTGCAAGCTGTCAGGTCTGAGTGAGATGGAGCACACCAGTGA
AAGGTTAAGTTCACCCTTTCACTGATGTGCTCCACTTCACTGAGACACATATCCACACAGAC
ACACAGAGACACACACATCCACCCAGACGCACGCA

[0105] In particular, in the present invention, a large GWAS meta-analysis (Mahajan et al., Nature Genetics, 2018, 50, p 1505-1513) of 898,930 human individuals of which 9% were diabetic was assessed, and post-translational glycosylation was surprisingly found to be significantly associated with type 2 diabetes risk in both normal and obese individuals. Importantly, the link between type 2 diabetes and post-translational glycosylation was not identifiable by standard ‘functional enrichment’ approaches and was thus not identified by the original authors of the meta-analysis.

[0106] The computational prediction was confirmed in in vivo mouse studies (Example 9). In these studies, mice were treated with siRNAs that inhibit the expression of B4GALT1. In these mice, plasma levels of LDL cholesterol, fasting glucose, and fibrinogen were significantly lower than in untreated mice, suggesting that inhibition of B4GALT1 can result in the prevention and/or treatment of diabetes, in particular type 2 diabetes.

[0107] Therefore, the invention relates to inhibitors of targets within the post translational glycosylation pathways, such as enzymes involved in these pathways, such as B4GALT1. The inhibition may be of the gene or protein resulting from expression of the gene and reference to a gene, such as B4GALT1, hereby explicitly incorporates a reference to inhibition of the expression or function of the gene and, separately, of the protein product.

[0108] Post translational glycosylation preferably refers to the post translational glycosylation seen in vivo in a human or human cell.

### Definitions

[0109] The “first strand”, also called the antisense strand or guide strand herein and which can be used interchangeably herein, refers to the nucleic acid strand, e.g. the strand of an siRNA, e.g. a dsiRNA, which includes a region that is substantially complementary to a target sequence, e.g. to an mRNA. As used herein, the term “region of complementarity” refers to the region on the antisense strand that is substantially complementary to a sequence, for example a target sequence. Where the region of complementarity is not fully complementary to the target sequence, the mismatches can be in the internal or terminal regions of the molecule. In some embodiments, a double stranded nucleic acid e.g. an siRNA agent of the invention includes a nucleotide mismatch in the antisense strand.

[0110] The “second strand” (also called the sense strand or passenger strand herein, and which can be used interchangeably herein), refers to the strand of a nucleic acid e.g. siRNA that includes a region that is substantially complementary to a region of the antisense strand as that term is defined herein.

[0111] In the context of molecule comprising a nucleic acid provided with a ligand moiety, optionally also with a linker moiety, the nucleic acid of the invention may be referred to as an oligonucleotide moiety or oligonucleoside moiety.

[0112] Oligonucleotides are short nucleic acid polymers. Whilst oligonucleotides contain phosphodiester bonds between the nucleoside component thereof (base plus sugar), the present invention is not limited to oligonucleotides always joined by such a phosphodiester bond between adjacent nucleosides, and other oligomers of nucleosides joined by bonds which are bonds other than a phosphate bond are contemplated. For example, a bond between nucleotides may be a phosphorothioate bond. Therefore, the term “oligonucleoside” herein covers both oligonucleotides and other oligomers of nucleosides. An oligonucleoside which is a nucleic acid having at least a portion which is an oligonucleotide is preferred according to the present invention. An oligonucleoside having one or more, or a majority of, phosphodiester backbone bonds between nucleosides is also preferred according to the present invention. An oligonucleoside having one or more, or a majority of, phosphodiester backbone bonds between nucleosides, and also having one or more phosphorothioate backbone bonds between nucleosides (typically in a terminal region of the first and/or second strands) is also preferred according to the present invention.

[0113] In some embodiments, a double stranded nucleic acid, e.g., siRNA agent of the invention includes a nucleoside mismatch in the sense strand. In some embodiments, the nucleoside mismatch is, for example, within 5, 4, 3, 2, or 1 nucleosides from the 3′-end of the nucleic acid e.g. siRNA.

[0114] In another embodiment, the nucleoside mismatch is, for example, in the 3′-terminal nucleoside of the nucleic acid, e.g., siRNA.

[0115] A “target sequence” (which may be called a target RNA or a target mRNA) refers to a contiguous portion of the nucleoside sequence of an mRNA molecule formed during the transcription of a gene, including mRNA that is a product of RNA processing of a primary transcription product, or can be a contiguous portion of the nucleotide sequence of any RNA molecule such as a LNCRNA which it is desired to inhibit.

[0116] The target sequence may be from about 10-35 nucleosides in length, e.g., about 15-30 nucleosides in length. For example, the target sequence can be from about 15-30 nucleosides, 15-29, 15-28, 15-27, 15-26, 15-25, 15-24, 15-23, 15-22, 15-21, 15-20, 15-19, 15-18, 15-17, 18-30, 18-29, 18-28, 18-27, 18-26, 18-25, 18-24, 18-23, 18-22, 18-21, 18-20, 19-30, 19-29, 19-28, 19-27, 19-26, 19-25, 19-24, 19-23, 19-22, 19-21, 19-20, 20-30, 20-29, 20-28, 20-27, 20-26, 20-25, 20-24, 20-23, 20-22, 20-21, 21-30, 21-29, 21-28, 21-27, 21-26, 21-25, 21-24, 21-23, or 21-22 nucleosides in length. Ranges and lengths intermediate to the above recited ranges and lengths are also contemplated to be part of the invention.

[0117] The term “ribonucleoside” or “nucleoside” can also refer to a modified nucleoside as further detailed below.

[0118] A nucleic acid can be a DNA or an RNA, and can comprise modified nucleosides. RNA is a preferred nucleic acid.

[0119] The terms “iRNA”, “siRNA”, “RNAi agent,” and “iRNA agent,” “RNA interference agent” as used interchangeably herein, refer to an agent that contains RNA, and which mediates the targeted cleavage of an RNA transcript via an RNA-induced silencing complex (RISC) pathway. siRNA directs the sequence-specific degradation of mRNA through RNA interference (RNAi).

[0120] A double stranded RNA is referred to herein as a “double stranded siRNA (dsiRNA) agent”, “double stranded siRNA (dsiRNA) molecule”, “double stranded RNA (dsRNA) agent”, “double stranded RNA (dsRNA) molecule”, “dsiRNA agent”, “dsiRNA molecule”, or “dsiRNA”, which refers to a complex of ribonucleic acid molecules, having a duplex structure comprising two anti-parallel and substantially complementary nucleic acid strands, referred to as having “sense” and “antisense” orientations with respect to a target RNA. The majority of nucleosides of each strand of the nucleic acid, e.g. a dsiRNA molecule, are preferably ribonucleosides, but in that case each or both strands can also include one or more non-ribonucleosides, e.g., a deoxyribonucleoside or a modified ribonucleoside. In addition, as used in this specification, an “siRNA” may include ribonucleosides with chemical modifications.

[0121] The term “modified nucleoside” refers to a nucleoside having, independently, a modified sugar moiety, a modified internucleoside linkage, or modified nucleobase, or any combination thereof. Thus, the term modified nucleoside encompasses substitutions, additions or removal of, e.g., a functional group or atom, to internucleoside linkages, sugar moieties, or nucleobases. Any such modifications, as used in a siRNA type molecule, are encompassed by “iRNA” or “RNAi agent” or “siRNA” or “siRNA agent” for the purposes of this specification and claims.

[0122] The duplex region of a nucleic acid of the invention e.g. a dsRNA may range from about 9 to 40 base pairs in length such as 9 to 36 base pairs in length, e.g., about 15-30 base pairs in length, for example, about 9, 10, 11, 12, 13, 14, 15, 16, 17, 18, 19, 20, 21, 22, 23, 24, 25, 26, 27, 28, 29, 30, 31, 32, 33, 34, 35, or 36 base pairs in length, such as about 15-30, 15-29, 15-28, 15-27, 15-26, 15-25, 15-24, 15-23, 15-22, 15-21, 15-20, 15-19, 15-18, 15-17, 18-30, 18-29, 18-28, 18-27, 18-26, 18-25, 18-24, 18-23, 18-22, 18-21, 18-20, 19-30, 19-29, 19-28, 19-27, 19-26, 19-25, 19-24, 19-23, 19-22, 19-21, 19-20, 20-30, 20-29, 20-28, 20-27, 20-26, 20-25, 20-24,20-23, 20-22, 20-21, 21-30, 21-29, 21-28, 21-27, 21-26, 21-25, 21-24, 21-23, or 21-22 base pairs in length.

[0123] The two strands forming the duplex structure may be different portions of one larger molecule, or they may be separate molecules e.g. RNA molecules.

[0124] The term “nucleoside overhang” refers to at least one unpaired nucleoside that extends from the duplex structure of a double stranded nucleic acid. A ds nucleic acid can comprise an overhang of at least one nucleoside; alternatively the overhang can comprise at least two nucleosides, at least three nucleosides, at least four nucleosides, at least five nucleosides, or more. A nucleoside overhang can comprise or consist of a nucleoside analog, including a deoxynucleoside. The overhang(s) can be on the sense strand, the antisense strand, or any combination thereof. Furthermore, the/nucleoside(s) of an overhang can be present on the 5′-end, 3′-end, or both ends of either an antisense or sense strand.

[0125] In certain embodiments, the antisense strand has a 1-10 nucleoside, e.g., 0-3, 1-3, 2-4, 2-5, 4-10, 5-10, 1, 2, 3, 4, 5, 6, 7, 8, 9, or 10 nucleoside overhang at the 3′-end or the 5′-end.

[0126] “Blunt” or “blunt end” means that there are no unpaired nucleoside at that end of the double stranded nucleic acid, i.e., no nucleoside overhang. The nucleic acids of the invention include those with no nucleoside overhang at one end or with no nucleoside overhangs at either end.

[0127] Unless otherwise indicated, the term “complementary,” when used to describe a first nucleoside sequence in relation to a second nucleoside sequence, refers to the ability of an oligonucleoside comprising the first nucleoside sequence to hybridize and form a duplex structure under certain conditions with an oligonucleoside or polynucleoside comprising the second nucleoside sequence, as will be understood by the skilled person. Such conditions can, for example, be stringent conditions, where stringent conditions can include: 400 mM NaCl, 40 mM PIPES pH 6.4, 1 mM EDTA, 50° C. or 70° C. for 12-16 hours followed by washing (see, e.g., “Molecular Cloning: A Laboratory Manual, Sambrook, et al. (1989) Cold Spring Harbor Laboratory Press).

[0128] Complementary sequences within nucleic acid e.g. a dsiRNA, as described herein, include base-pairing of the oligonucleoside or polynucleoside comprising a first nucleoside sequence to an oligonucleoside or polynucleoside comprising a second nucleoside sequence over the entire length of one or both nucleoside sequences. Such sequences can be referred to as “fully complementary” with respect to each other herein. However, where a first sequence is referred to as “substantially complementary” or “partially complementary” with respect to a second sequence herein, the two sequences can be fully complementary, or they can form one or more mismatched base pairs, such as 2, 4, or 5 mismatched base pairs, but preferably not more than 5, while retaining the ability to hybridize under the conditions most relevant to their ultimate application, e.g., inhibition of gene expression via a RISC pathway. Overhangs shall not be regarded as mismatches with regard to the determination of complementarity. For example, a nucleic acid e.g. dsRNA comprising one oligonucleoside 17 nucleosides in length and another oligonucleoside 19 nucleosides in length, wherein the longer oligonucleoside comprises a sequence of 17 nucleosides that is fully complementary to the shorter oligonucleoside, can yet be referred to as “fully complementary”.

[0129] “Complementary” sequences, as used herein, can also include, or be formed entirely from, non-Watson-Crick base pairs or base pairs formed from non-natural and modified nucleosides, in so far as the above requirements with respect to their ability to hybridize are fulfilled. Such non-Watson-Crick base pairs include, but are not limited to, G:U Wobble or Hoogstein base pairing.

[0130] The terms “complementary,” “fully complementary” and “substantially/partially complementary” herein can be used with respect to the base matching between the sense strand and the antisense strand of a nucleic acid e.g. dsiRNA, or between the antisense strand of a double stranded nucleic acid e.g. siRNA agent and a target sequence.

[0131] Within the present invention, the second strand of the nucleic acid according to the invention, in particular a dsiRNA for inhibiting B4GALT1, is at least partially complementary to the first strand of said nucleic acid. In certain embodiments, a first and second strand of a nucleic acid according to the invention are partially complementary if they form a duplex region having a length of at least 17 base pairs and comprising not more than 1, 2, 3, 4, or 5 mismatched base pairs.

[0132] In certain embodiments, a first and second strand of the nucleic acid according to the invention are partially complementary if they form a duplex region having a length of 19 base pairs and comprising not more than 1, 2, 3, 4, or 5 mismatched base pairs. In certain embodiments, a first and second strand of the nucleic acid according to the invention are partially complementary if they form a duplex region having a length of 21 base pairs comprising not more than 1, 2, 3, 4, or 5 mismatched base pairs.

[0133] Alternatively, a first and second strand of the nucleic acid according to the invention are partially complementary if they form a duplex region having a length of at least 17 base pairs, wherein at least 14, 15, 16 or 17 of said base pairs are complementary base pairs, in particular Watson-Crick base pairs.

[0134] [In certain embodiments, a first and second strand of the nucleic acid according to the invention are partially complementary if they form a duplex region having a length of 19 base pairs, wherein at least 14, 15, 16, 17, 18 or all 19 base pairs are complementary base pairs, in particular Watson-Crick base pairs. In certain embodiments, a first and second strand of the nucleic acid according to the invention are partially complementary if they form a duplex region having a length of 21 base pairs, wherein at least 16, 17, 18, 19, 20 or all 21 base pairs are complementary base pairs, in particular Watson-Crick base pairs.

[0135] As used herein, a nucleic acid that is “substantially complementary” or “partially complementary” to at least part of a messenger RNA (mRNA) refers to a polynucleoside that is substantially or partially complementary to a contiguous portion of the mRNA of interest (e.g., an mRNA encoding a gene). In certain embodiments, the contiguous portion of the mRNA is a sequence as listed in Table 1, i.e., any one of SEQ ID NOs:_2-21 or 102-201. For example, a polynucleoside is complementary to at least a part of an mRNA of a gene of interest if the sequence is substantially or partially complementary to a non-interrupted portion of an mRNA encoding that gene.

[0136] Accordingly, in some preferred embodiments, the antisense oligonucleosides as disclosed herein are fully complementary to the target gene sequence.

[0137] In other embodiments, the antisense oligonucleosides disclosed herein are substantially or partially complementary to a target RNA sequence and comprise a contiguous nucleoside sequence which is at least about 80% complementary over its entire length to the equivalent region of the target RNA sequence, such as at least about 85%, 86%, 87%, 88%, 89%, about 90%, 91%, 92%, 93%, 94%, 95%, 96%, 97%, 98%, or 99% complementary or 100% complementary.

[0138] In certain embodiments, the first (antisense) strand of a nucleic acid according to the invention is partially or fully complementary to a contiguous portion of RNA transcribed from the B4GALT1 gene. In certain embodiments, the first strand of the nucleic acid according to the invention is partially or fully complementary to a contiguous portion of at least 17 nucleosides of the B4GALT1 mRNA. In certain embodiments, the first strand of the nucleic acid according to the invention is partially or fully complementary to a contiguous portion of 17, 18, 19, 20, 21, 22 or 23 nucleosides of the B4GALT1 mRNA. In certain embodiments, the first strand of the nucleic acid according to the invention is partially or fully complementary to a contiguous portion of 17, 18 or 19 nucleosides of any one of the sequences as listed in Table 1, i.e., any one of SEQ ID NOs: 2-21 or 102-201. In certain embodiments, the first strand of the nucleic acid according to the invention is partially or fully complementary to a contiguous portion of 19, 20, 21, 22 or 23 nucleosides of any one of SEQ ID NOs: 102-201.

[0139] In certain embodiments, the first (antisense) strand of the nucleic acid according to the invention is partially complementary to a contiguous portion of the B4GALT1 mRNA if it comprises a contiguous nucleoside sequence of at least 17 nucleosides, wherein at least 14, 15, 16 or 17 nucleosides of said contiguous nucleoside sequence are complementary to a contiguous portion of the B4GALT1 mRNA. In certain embodiments, the first strand of the nucleic acid according to the invention comprises a contiguous nucleoside sequence of at least 17 nucleosides, wherein at least 14, 15, 16 or 17 nucleosides of said contiguous nucleoside sequence are complementary to a contiguous portion of any one of the sequences listed in Table 1, i.e., any one of SEQ ID NOs: 2-21 or 102-201. In certain embodiments, the first strand of the nucleic acid according to the invention comprises a contiguous nucleoside sequence of 19 nucleosides, wherein at least 14, 15, 16, 17, 18 or all 19 nucleosides of said contiguous nucleoside sequence are complementary to a contiguous portion of any one of the sequences listed in Table 1, i.e., any one of SEQ ID NOs: 2-21 or 102-201. In certain embodiments, the first strand of the nucleic acid according to the invention comprises a contiguous nucleoside sequence of 21 nucleosides, wherein at least 16, 17, 18, 19, 20 or all 21 nucleosides of said contiguous nucleoside sequence are complementary to a contiguous portion of any one of SEQ ID NOs: 102-201. In certain embodiments, the first strand of the nucleic acid according to the invention comprises a contiguous nucleoside sequence of 23 nucleosides, wherein at least 18, 19, 20, 21, 22 or all 23 nucleosides of said contiguous nucleoside sequence are complementary to a contiguous portion of any one of SEQ ID NOs: 102-201.

[0140] In some embodiments, a nucleic acid e.g. an siRNA of the invention includes a sense strand that is substantially or partially complementary to an antisense polynucleoside which, in turn, is complementary to a target gene sequence and comprises a contiguous nucleoside sequence which is at least about 80% complementary over its entire length to the equivalent region of the nucleoside sequence of the antisense strand, such as about 85%, 86%, 87%, 88%, 89%, 90%, 91%, 92%, 93%, 94%, 95%, 96%, 97%, 98%, or 99% complementary, or 100% complementary.

[0141] In some embodiments, a nucleic acid e.g. an siRNA of the invention includes an antisense strand that is substantially or partially complementary to the target sequence and comprises a contiguous nucleoside sequence which is at least 80% complementary over its entire length to the target sequence such as about 85%, 86%, 87%, 88%, 89%, 90%, 91%, 92%, 93%, 94%, 95%, 96%, 97%, 98%, or 99% complementary, or 100% complementary.

[0142] As used herein, a “subject” is an animal, such as a mammal, including a primate (such as a human, a non-human primate, e.g., a monkey, and a chimpanzee), or a non-primate or a bird that expresses the target gene, either endogenously or heterologously, when the target gene sequence has sufficient complementarity to the nucleic acid e.g. iRNA agent to promote target knockdown. In certain preferred embodiments, the subject is a human.

[0143] The terms “treating” or “treatment” refer to a beneficial or desired result including, but not limited to, alleviation or amelioration of one or more symptoms associated with gene expression. “Treatment” can also mean prolonging survival as compared to expected survival in the absence of treatment. Treatment can include prevention of development of co-morbidities, e.g. reduced liver damage in a subject with a hepatic infection.

[0144] “Therapeutically effective amount,” as used herein, is intended to include the amount of a nucleic acid e.g. an iRNA that, when administered to a patient for treating a subject having disease, is sufficient to effect treatment of the disease (e.g., by diminishing, ameliorating or maintaining the existing disease or one or more symptoms of disease or its related comorbidities).

[0145] The phrase “pharmaceutically acceptable” is employed herein to refer to compounds, materials, compositions, or dosage forms which are suitable for use in contact with the tissues of human subjects and animal subjects without excessive toxicity, irritation, allergic response, or other problem or complication, commensurate with a reasonable benefit/risk ratio.

[0146] The phrase “pharmaceutically-acceptable carrier” as used herein means a pharmaceutically-acceptable material, composition, or vehicle, such as a liquid or solid filler, diluent, excipient, manufacturing aid or solvent encapsulating material, involved in carrying or transporting the subject compound from one organ, or portion of the body, to another organ, or portion of the body. Each carrier must be “acceptable” in the sense of being compatible with the other ingredients of the formulation and not injurious to the subject being treated.

[0147] Where a value or range of values of a parameter are recited, it is intended that values and ranges intermediate to the recited values are also intended to be part of this invention.

[0148] The articles “a” and “an” are used herein to refer to one or to more than one (i.e. to at least one) of the grammatical object of the article.

[0149] The term “including” is used herein to mean, and is used interchangeably with, the phrase “including but not limited to”.

[0150] The term “or” is used herein to mean, and is used interchangeably with, the term “and/or,” unless context clearly indicates otherwise. For example, “sense strand or antisense strand” is understood as “sense strand or antisense strand or sense strand and antisense strand.”

[0151] The term “about” is used herein to mean within the typical ranges of tolerances in the art. For example, “about” can be understood as about 2 standard deviations from the mean. In certain embodiments, about means+10%. In certain embodiments, about means+5%. When about is present before a series of numbers or a range, it is understood that “about” can modify each of the numbers in the series or range.

[0152] The term “at least” prior to a number or series of numbers is understood to include the number adjacent to the term “at least”, and all subsequent numbers or integers that could logically be included, as clear from context. For example, the number of nucleotides in a nucleic acid molecule must be an integer. For example, “at least 18 nucleosides of a 21 nucleoside nucleic acid molecule” means that 18, 19, 20, or 21 nucleosides have the indicated property. When at least is present before a series of numbers or a range, it is understood that “at least” can modify each of the numbers in the series or range.

[0153] As used herein, “no more than” or “less than” is understood as the value adjacent to the phrase and logical lower values or integers, as logical from context, to zero. For example, a duplex with an overhang of “no more than 2 nucleosides” has a 2, 1, or 0 nucleoside overhang. When “no more than” is present before a series of numbers or a range, it is understood that “no more than” can modify each of the numbers in the series or range.

[0154] The terminal region of a strand is the last 5 nucleotides from the 5′ or the 3′ end. A nucleobase sequence is the sequence of the bases of the nucleic acid in an oligomer.

[0155] Various embodiments of the invention can be combined as determined appropriate by one of skill in the art.

### Target

[0156] A target for inhibition disclosed herein may be, without limitation, an mRNA, LNCRNA, polypeptide, protein, or gene.

[0157] The target herein is a target involved in the post translational glycosylation pathway for proteins. These are preferably a target the inhibition of which helps in the prevention or treatment of diabetes. A preferred target for inhibition is 1B4GALT1, and inhibition may be effected by inhibition of expression or function of the gene or protein or both.

[0158] In one aspect the target is a mRNA expressed from a gene or a long non-coding RNA (LNCRNA).

[0159] In a preferred embodiment, the target is an mRNA that is the result of expression of the 1B4GALT1 gene. Exemplary target sequences on the 1B4GALT1 mRNA are listed below in Table 1.

TABLE 1

| | Oligonucleoside mRNA | Starting position |
|---|---|---|
| SEQ ID NO | target sequence 5′→3′ | on NM_001497.4 |
| SEQ ID NO: 2 | CUUGAAUUUCCUAUGUAUU | 2210 |
| SEQ ID NO: 3 | AAUGGAUUUCCUAAUAAUU | 1068 |
| SEQ ID NO: 4 | UCAGUAUUUUGGAGGUGUC | 1016 |
| SEQ ID NO: 5 | UGGAUUUCCUAAUAAUUAU | 1070 |
| SEQ ID NO: 6 | UGAAUUUCCUAUGUAUUUU | 2212 |
| SEQ ID NO: 7 | GCUGGAUGUACAGAGAUAC | 1301 |
| SEQ ID NO: 8 | CCAAAGUGCCUUAAAAGAA | 3448 |
| SEQ ID NO: 9 | UAUGUAAACUUGAAUUUCC | 2202 |
| SEQ ID NO: 10 | GGCACAUUUCCGUUGCAAU | 967 |
| SEQ ID NO: 11 | AUGUAAACUUGAAUUUCCU | 2203 |
| SEQ ID NO: 12 | AUGGAUUUCCUAAUAAUUA | 1069 |
| SEQ ID NO: 13 | UGUCUCUGCUCUAAGUAAA | 1031 |
| SEQ ID NO: 14 | CAAAGUGCCUUAAAAGAAA | 3449 |
| SEQ ID NO: 15 | UGAAUGUGCCUUUUAAUUA | 2822 |
| SEQ ID NO: 16 | ACUUGAAUUUCCUAUGUAU | 2209 |
| SEQ ID NO: 17 | CUGACUUUUCCAAAGUGCC | 3439 |
| SEQ ID NO: 18 | CAAUGGAUUUCCUAAUAAU | 1067 |
| SEQ ID NO: 19 | UUCAGUAUUUUGGAGGUGU | 1015 |
| SEQ ID NO: 20 | CCUGACUUUUCCAAAGUGC | 3438 |
| SEQ ID NO: 21 | GGAUUUCCUAAUAAUUAUU | 1071 |
| SEQ ID NO: 102 | GUAAACUUGAAUUUCCUAUGUAU | 2209 |
| SEQ ID NO: 103 | GCUAUGUAAACUUGAAUUUCCUA | 2204 |
| SEQ ID NO: 104 | UAUGUAAACUUGAAUUUCCUAUG | 2206 |
| SEQ ID NO: 105 | AACUUGAAUUUCCUAUGUAUUUU | 2212 |
| SEQ ID NO: 106 | AAACUUGAAUUUCCUAUGUAUUU | 2211 |
| SEQ ID NO: 107 | CUAUGUAAACUUGAAUUUCCUAU | 2205 |
| SEQ ID NO: 108 | GCAUGCUAUGUAAACUUGAAUUU | 2200 |
| SEQ ID NO: 109 | UGUCUGAUUUCUGAAUGUAAAGU | 2035 |
| SEQ ID NO: 110 | UGUAAACUUGAAUUUCCUAUGUA | 2208 |
| SEQ ID NO: 111 | UCAAUGGAUUUCCUAAUAAUUAU | 1070 |
| SEQ ID NO: 112 | CAAUGGAUUUCCUAAUAAUUAUU | 1071 |
| SEQ ID NO: 113 | GGCAUGCUAUGUAAACUUGAAUU | 2199 |
| SEQ ID NO: 114 | UUUUGGAGGUGUCUCUGCUCUAA | 1026 |
| SEQ ID NO: 115 | AAUCCUCAGAGGUUUGACCGAAU | 1225 |
| SEQ ID NO: 116 | AUCAAUGGAUUUCCUAAUAAUUA | 1069 |
| SEQ ID NO: 117 | GACUUUUCCAAAGUGCCUUAAAA | 3445 |
| SEQ ID NO: 118 | CAUGCUAUGUAAACUUGAAUUUC | 2201 |
| SEQ ID NO: 119 | CCAUCAAUGGAUUUCCUAAUAAU | 1067 |
| SEQ ID NO: 120 | UAAACUUGAAUUUCCUAUGUAUU | 2210 |
| SEQ ID NO: 121 | UCUGCUCUAAGUAAACAACAGUU | 1039 |
| SEQ ID NO: 122 | AUGCUAUGUAAACUUGAAUUUCC | 2202 |
| SEQ ID NO: 123 | GAGGUGUCUCUGCUCUAAGUAAA | 1031 |
| SEQ ID NO: 124 | AGCAUGAAUGUGCCUUUUAAUUA | 2822 |
| SEQ ID NO: 125 | GGAGGUGUCUCUGCUCUAAGUAA | 1030 |
| SEQ ID NO: 126 | UUUCCAAAGUGCCUUAAAAGAAA | 3449 |
| SEQ ID NO: 127 | UGCUAUGUAAACUUGAAUUUCCU | 2203 |
| SEQ ID NO: 128 | UUCAGUAUUUUGGAGGUGUCUCU | 1019 |
| SEQ ID NO: 129 | CCAGCAUGAAUGUGCCUUUUAAU | 2820 |
| SEQ ID NO: 130 | AGGUGUCUCUGCUCUAAGUAAAC | 1032 |
| SEQ ID NO: 131 | GGAGGAGAAGAUGAUGACAUUUU | 1102 |
| SEQ ID NO: 132 | UUGGAGGUGUCUCUGCUCUAAGU | 1028 |
| SEQ ID NO: 133 | UUGUCUGAUUUCUGAAUGUAAAG | 2034 |
| SEQ ID NO: 134 | CCACGGCACAUUUCCGUUGCAAU | 967 |
| SEQ ID NO: 135 | UGGAUUUCCUAAUAAUUAUUGGG | 1074 |
| SEQ ID NO: 136 | UGUUCAGUAUUUUGGAGGUGUCU | 1017 |
| SEQ ID NO: 137 | CAUCAAUGGAUUUCCUAAUAAUU | 1068 |
| SEQ ID NO: 138 | CAAUCCUCAGAGGUUUGACCGAA | 1224 |
| SEQ ID NO: 139 | GAUGGUUUGAACUCACUCACCUA | 1276 |
| SEQ ID NO: 140 | UUUUCCAAAGUGCCUUAAAAGAA | 3448 |
| SEQ ID NO: 141 | ACUUUUCCAAAGUGCCUUAAAAG | 3446 |
| SEQ ID NO: 142 | GGUGUCUCUGCUCUAAGUAAACA | 1033 |
| SEQ ID NO: 143 | AUCCUGACUUUUCCAAAGUGCCU | 3440 |
| SEQ ID NO: 144 | GUAUUUUGGAGGUGUCUCUGCUC | 1023 |
| SEQ ID NO: 145 | AUGGUUUGAACUCACUCACCUAC | 1277 |
| SEQ ID NO: 146 | AUUUUGGAGGUGUCUCUGCUCUA | 1025 |
| SEQ ID NO: 147 | UGUCUCUGCUCUAAGUAAACAAC | 1035 |
| SEQ ID NO: 148 | CGGCACAUUUCCGUUGCAAUGGA | 970 |
| SEQ ID NO: 149 | GCAUGAAUGUGCCUUUUAAUUAG | 2823 |
| SEQ ID NO: 150 | CACGGCACAUUUCCGUUGCAAUG | 968 |
| SEQ ID NO: 151 | UAUACCCAAAUCACAGUGGACAU | 1330 |
| SEQ ID NO: 152 | AUCACAGUGGACAUCGGGACACC | 1339 |
| SEQ ID NO: 153 | GUGUCUCUGCUCUAAGUAAACAA | 1034 |
| SEQ ID NO: 154 | CAGAUCCUGACUUUUCCAAAGUG | 3437 |
| SEQ ID NO: 155 | CAGCAUGAAUGUGCCUUUUAAUU | 2821 |
| SEQ ID NO: 156 | CUUAUGUUCAGUAUUUUGGAGGU | 1013 |
| SEQ ID NO: 157 | AAUGGAUUUCCUAAUAAUUAUUG | 1072 |
| SEQ ID NO: 158 | UGGAGGUGUCUCUGCUCUAAGUA | 1029 |
| SEQ ID NO: 159 | AGGUGCUGGAUGUACAGAGAUAC | 1301 |
| SEQ ID NO: 160 | CUGCUCUAAGUAAACAACAGUUU | 1040 |
| SEQ ID NO: 161 | UCUCUGCUCUAAGUAAACAACAG | 1037 |
| SEQ ID NO: 162 | UAUGUUCAGUAUUUUGGAGGUGU | 1015 |
| SEQ ID NO: 163 | UAUUUUGGAGGUGUCUCUGCUCU | 1024 |
| SEQ ID NO: 164 | ACCCAAAUCACAGUGGACAUCGG | 1333 |
| SEQ ID NO: 165 | CUCUGCUCUAAGUAAACAACAGU | 1038 |
| SEQ ID NO: 166 | UUUGGAGGUGUCUCUGCUCUAAG | 1027 |
| SEQ ID NO: 167 | CUUUUCCAAAGUGCCUUAAAAGA | 3447 |
| SEQ ID NO: 168 | GGUGCUGGAUGUACAGAGAUACC | 1302 |
| SEQ ID NO: 169 | GAUCCUGACUUUUCCAAAGUGCC | 3439 |
| SEQ ID NO: 170 | CUGCGUCUCUCCUCACAAGGUGG | 684 |
| SEQ ID NO: 171 | AUGGAUUUCCUAAUAAUUAUUGG | 1073 |
| SEQ ID NO: 172 | ACGGCACAUUUCCGUUGCAAUGG | 969 |
| SEQ ID NO: 173 | UGUAUACCCAAAUCACAGUGGAC | 1328 |
| SEQ ID NO: 174 | GUUCAGUAUUUUGGAGGUGUCUC | 1018 |
| SEQ ID NO: 175 | GGCUUUCAAGAAGCCUUGAAGGA | 862 |
| SEQ ID NO: 176 | AAUUAUUGGGGCUGGGGAGGAGA | 1087 |
| SEQ ID NO: 177 | GGACAUCGGGACACCGAGCUAGC | 1347 |
| SEQ ID NO: 178 | AGAUCCUGACUUUUCCAAAGUGC | 3438 |
| SEQ ID NO: 179 | GUAUACCCAAAUCACAGUGGACA | 1329 |
| SEQ ID NO: 180 | CCAUUCCGCAACCGGCAGGAGCA | 718 |
| SEQ ID NO: 181 | GUGCUGGAUGUACAGAGAUACCC | 1303 |
| SEQ ID NO: 182 | GACUGCGUCUCUCCUCACAAGGU | 682 |
| SEQ ID NO: 183 | CAAAUCACAGUGGACAUCGGGAC | 1336 |
| SEQ ID NO: 184 | GUCUCUGCUCUAAGUAAACAACA | 1036 |
| SEQ ID NO: 185 | AUGUUCAGUAUUUUGGAGGUGUC | 1016 |
| SEQ ID NO: 186 | AUUAUUGGGGCUGGGGAGGAGAA | 1088 |
| SEQ ID NO: 187 | CCUUAUGUUCAGUAUUUUGGAGG | 1012 |
| SEQ ID NO: 188 | AUACCCAAAUCACAGUGGACAUC | 1331 |
| SEQ ID NO: 189 | GGAUUUCCUAAUAAUUAUUGGGG | 1075 |
| SEQ ID NO: 190 | UCACAGUGGACAUCGGGACACCG | 1340 |
| SEQ ID NO: 191 | UUGUAUACCCAAAUCACAGUGGA | 1327 |
| SEQ ID NO: 192 | AUUGGGGCUGGGGAGGAGAAGAU | 1091 |
| SEQ ID NO: 193 | UUAUGUUCAGUAUUUUGGAGGUG | 1014 |
| SEQ ID NO: 194 | UGGACAUCGGGACACCGAGCUAG | 1346 |
| SEQ ID NO: 195 | ACAGUGGACAUCGGGACACCGAG | 1342 |
| SEQ ID NO: 196 | UAAUUAUUGGGGCUGGGGAGGAG | 1086 |
| SEQ ID NO: 197 | UUGGGGCUGGGGAGGAGAAGAUG | 1092 |
| SEQ ID NO: 198 | GGACUGCGUCUCUCCUCACAAGG | 681 |
| SEQ ID NO: 199 | CUAAUAAUUAUUGGGGCUGGGGA | 1082 |
| SEQ ID NO: 200 | AAUCACAGUGGACAUCGGGACAC | 1338 |
| SEQ ID NO: 201 | ACUGCGUCUCUCCUCACAAGGUG | 683 |

[0160] It is to be understood that SEQ ID NOs: 2-21 and SEQ ID NOs: 102-201 relate to human (Homo sapiens) mRNA sequences.

### Disease/Conditions

[0161] The invention relates to an inhibitor suitable for use, or for use, in treatment of diabetes, such as type 1 or type 2 diabetes, preferably type 2 diabetes.

### Inhibitors

[0162] Inhibitors of the invention include nucleic acids such as siRNAs, antibodies and antigen binding fragments thereof, e.g., monoclonal antibodies, polypeptides, antibody-drug conjugates, and small molecules. Preferred are nucleic acids such as siRNA.

[0163] Certain preferred features of inhibitors of the invention, where these are oligonucelosides such as siRNA, are given below.

[0164] In certain embodiments, the nucleic acid comprises a first strand comprising a sequence that is at least partially complementary to a portion of RNA transcribed from the B4GALT1 gene (SEQ ID NO:1). In a preferred embodiment, the nucleic acid comprises a first strand comprising a sequence that is at least partially complementary to a B4GALT1 mRNA (NM_001497.4).

[0165] In certain embodiments, the nucleic acid for inhibiting expression of B4GALT1 comprises a duplex region that comprises a first strand and a second strand that is at least partially complementary to the first strand, wherein said first strand is:
[0166] (i) at least partially complementary to a portion of RNA transcribed from the B4GALT1 gene, and
[0167] (ii) comprises at least 17 contiguous nucleosides differing by 0 or 1 nucleosides from any one of SEQ ID NOs: 22-41 or SEQ ID NOs: 202-301.

[0168] In certain embodiments, the first strand comprises nucleosides 2-18 of any one of the sequences set forth in SEQ ID NOs: 22-41 or SEQ ID NOs: 202-301.

[0169] In certain embodiments, the nucleic acid for inhibiting expression of B4GALT1 comprises a duplex region that comprises a first strand and a second strand that is at least partially complementary to the first strand, wherein said first strand is:
[0170] (i) at least partially complementary to a portion of RNA transcribed from the B4GALT1 gene, and
[0171] (ii) comprises at least 21 contiguous nucleosides differing by 0 or 1 nucleosides from any one of SEQ ID NOs: 202-301.

[0172] In certain embodiments, the first strand comprises nucleosides 2-22 of any one of the sequences set forth in SEQ ID NOs: 202-301.

[0173] In certain embodiments, the first strand comprises any one of SEQ ID NOs: 22-41 or SEQ ID NOs: 202-301.

[0174] In certain embodiments, the second strand comprises a nucleoside sequence of at least 17 contiguous nucleosides differing by 0 or 1 nucleosides from any one of SEQ ID NOs: 42-61 or SEQ ID NOs: 302-401; wherein the second strand has a region of at least 85% complementarity over the 17 contiguous nucleosides to the first strand.

[0175] In certain embodiments, the second strand comprises a nucleoside sequence of at least 19 contiguous nucleosides differing by 0 or 1 nucleosides from any one of SEQ ID NOs: 302-401; wherein the second strand has a region of at least 85% complementarity over the 19 contiguous nucleosides to the first strand.

[0176] In certain embodiments, the second strand comprises a nucleoside sequence of at least 21 contiguous nucleosides differing by 0 or 1 nucleosides from any one of SEQ ID NOs: 302-401; wherein the second strand has a region of at least 85% complementarity over the 21 contiguous nucleosides to the first strand.

[0177] In certain embodiments, the second strand comprises any one of SEQ ID NOs: 42-61 or SEQ ID NOs: 302-401.

[0178] In certain embodiments, the nucleic acid comprises a first strand that comprises, consists of, or consists essentially of a nucleoside sequence differing by 0 or 1 nucleosides from any one of SEQ ID NOs: 22-41 or SEQ ID NOs: 202-301;

[0179] And a second strand that comprises, consists of, or consists essentially of a nucleoside sequence differing by 0 or 1 nucleosides from any one of SEQ ID NOs: 42-61 or SEQ ID NOs: 302-401.

[0180] It is preferred herein that the duplex region is formed between a first (antisense) strand and a complementary second (sense) strand. Exemplary pairs of complementary antisense and sense strands are listed in Table 2 below:

TABLE 2

| | First (Antisense) Strand | | Second (Sense) Strand | |
|---|---|---|---|---|
| | Base Sequence | | Base Sequence | |
| | 5′→3′ | | 5′→3′ | Corresponding |
| SEQ ID | (Shown as an Unmodified | SEQ ID | (Shown as an Unmodified | positions on |
| NO (AS) | Nucleoside Sequence) | NO (SS) | Nucleoside Sequence) | NM_001497.4 |
| SEQ ID | AAUACAUAGGAAAUUCA | SEQ ID | CUUGAAUUUCCUAUGUA | 2210-2229 |
| NO: 22 | AG | NO: 42 | UU | |
| SEQ ID | AAUUAUUAGGAAAUCCA | SEQ ID | AAUGGAUUUCCUAAUAA | 1068-1087 |
| NO: 23 | UU | NO: 43 | UU | |
| SEQ ID | GACACCUCCAAAAUACU | SEQ ID | UCAGUAUUUUGGAGGU | 1016-1035 |
| NO: 24 | GA | NO: 44 | GUC | |
| SEQ ID | AUAAUUAUUAGGAAAUC | SEQ ID | UGGAUUUCCUAAUAAUU | 1070-1089 |
| NO: 25 | CA | NO: 45 | AU | |
| SEQ ID | AAAAUACAUAGGAAAUU | SEQ ID | UGAAUUUCCUAUGUAUU | 2212-2231 |
| NO: 26 | CA | NO: 46 | UU | |
| SEQ ID | GUAUCUCUGUACAUCCA | SEQ ID | GCUGGAUGUACAGAGAU | 1301-1320 |
| NO: 27 | GC | NO: 47 | AC | |
| SEQ ID | UUCUUUUAAGGCACUUU | SEQ ID | CCAAAGUGCCUUAAAAG | 3448-3467 |
| NO: 28 | GG | NO: 48 | AA | |
| SEQ ID | GGAAAUUCAAGUUUACA | SEQ ID | UAUGUAAACUUGAAUU | 2202-2221 |
| NO: 29 | UA | NO: 49 | UCC | |
| SEQ ID | AUUGCAACGGAAAUGUG | SEQ ID | GGCACAUUUCCGUUGCA | 967-986 |
| NO: 30 | CC | NO: 50 | AU | |
| SEQ ID | AGGAAAUUCAAGUUUAC | SEQ ID | AUGUAAACUUGAAUUUC | 2203-2222 |
| NO: 31 | AU | NO: 51 | CU | |
| SEQ ID | UAAUUAUUAGGAAAUCC | SEQ ID | AUGGAUUUCCUAAUAAU | 1069-1088 |
| NO: 32 | AU | NO: 52 | UA | |
| SEQ ID | UUUACUUAGAGCAGAGA | SEQ ID | UGUCUCUGCUCUAAGUA | 1031-1050 |
| NO: 33 | CA | NO: 53 | AA | |
| SEQ ID | UUUCUUUUAAGGCACUU | SEQ ID | CAAAGUGCCUUAAAAGA | 3449-3468 |
| NO: 34 | UG | NO: 54 | AA | |
| SEQ ID | UAAUUAAAAGGCACAUU | SEQ ID | UGAAUGUGCCUUUUAAU | 2822-2841 |
| NO: 35 | CA | NO: 55 | UA | |
| SEQ ID | AUACAUAGGAAAUUCAA | SEQ ID | ACUUGAAUUUCCUAUGU | 2209-2228 |
| NO: 36 | GU | NO: 56 | AU | |
| SEQ ID | GGCACUUUGGAAAAGUC | SEQ ID | CUGACUUUUCCAAAGUG | 3439-3458 |
| NO: 37 | AG | NO: 57 | CC | |
| SEQ ID | AUUAUUAGGAAAUCCAU | SEQ ID | CAAUGGAUUUCCUAAUA | 1067-1086 |
| NO: 38 | UG | NO: 58 | AU | |
| SEQ ID | ACACCUCCAAAAUACUG | SEQ ID | UUCAGUAUUUUGGAGG | 1015-1034 |
| NO: 39 | AA | NO: 59 | UGU | |
| SEQ ID | GCACUUUGGAAAAGUCA | SEQ ID | CCUGACUUUUCCAAAGU | 3438-3457 |
| NO: 40 | GG | NO: 60 | GC | |
| SEQ ID | AAUAAUUAUUAGGAAAU | SEQ ID | GGAUUUCCUAAUAAUUA | 1071-1090 |
| NO: 41 | CC | NO: 61 | UU | |
| SEQ ID | AUACAUAGGAAAUUCAA | SEQ ID | AAACUUGAAUUUCCUAU | 2209-2230 |
| NO: 202 | GUUUAC | NO: 302 | GUAU | |
| SEQ ID | UAGGAAAUUCAAGUUUA | SEQ ID | UAUGUAAACUUGAAUU | 2204-2225 |
| NO: 203 | CAUAGC | NO: 303 | UCCUA | |
| SEQ ID | CAUAGGAAAUUCAAGUU | SEQ ID | UGUAAACUUGAAUUUCC | 2206-2227 |
| NO: 204 | UACAUA | NO: 304 | UAUG | |
| SEQ ID | AAAAUACAUAGGAAAUU | SEQ ID | CUUGAAUUUCCUAUGUA | 2212-2233 |
| NO: 205 | CAAGUU | NO: 305 | UUUU | |
| SEQ ID | AAAUACAUAGGAAAUUC | SEQ ID | ACUUGAAUUUCCUAUGU | 2211-2232 |
| NO: 206 | AAGUUU | NO: 306 | AUUU | |
| SEQ ID | AUAGGAAAUUCAAGUUU | SEQ ID | AUGUAAACUUGAAUUUC | 2205-2226 |
| NO: 207 | ACAUAG | NO: 307 | CUAU | |
| SEQ ID | AAAUUCAAGUUUACAUA | SEQ ID | AUGCUAUGUAAACUUGA | 2200-2221 |
| NO: 208 | GCAUGC | NO: 308 | AUUU | |
| SEQ ID | ACUUUACAUUCAGAAAU | SEQ ID | UCUGAUUUCUGAAUGUA | 2035-2056 |
| NO: 209 | CAGACA | NO: 309 | AAGU | |
| SEQ ID | UACAUAGGAAAUUCAAG | SEQ ID | UAAACUUGAAUUUCCUA | 2208-2229 |
| NO: 210 | UUUACA | NO: 310 | UGUA | |
| SEQ ID | AUAAUUAUUAGGAAAUC | SEQ ID | AAUGGAUUUCCUAAUAA | 1070-1091 |
| NO: 211 | CAUUGA | NO: 311 | UUAU | |
| SEQ ID | AAUAAUUAUUAGGAAAU | SEQ ID | AUGGAUUUCCUAAUAAU | 1071-1092 |
| NO: 212 | CCAUUG | NO: 312 | UAUU | |
| SEQ ID | AAUUCAAGUUUACAUAG | SEQ ID | CAUGCUAUGUAAACUUG | 2199-2220 |
| NO: 213 | CAUGCC | NO: 313 | AAUU | |
| SEQ ID | UUAGAGCAGAGACACCU | SEQ ID | UUGGAGGUGUCUCUGCU | 1026-1047 |
| NO: 214 | CCAAAA | NO: 314 | CUAA | |
| SEQ ID | AUUCGGUCAAACCUCUG | SEQ ID | UCCUCAGAGGUUUGACC | 1225-1246 |
| NO: 215 | AGGAUU | NO: 315 | GAAU | |
| SEQ ID | UAAUUAUUAGGAAAUCC | SEQ ID | CAAUGGAUUUCCUAAUA | 1069-1090 |
| NO: 216 | AUUGAU | NO: 316 | AUUA | |
| SEQ ID | UUUUAAGGCACUUUGGA | SEQ ID | CUUUUCCAAAGUGCCUU | 3445-3466 |
| NO: 217 | AAAGUC | NO: 317 | AAAA | |
| SEQ ID | GAAAUUCAAGUUUACAU | SEQ ID | UGCUAUGUAAACUUGAA | 2201-2222 |
| NO: 218 | AGCAUG | NO: 318 | UUUC | |
| SEQ ID | AUUAUUAGGAAAUCCAU | SEQ ID | AUCAAUGGAUUUCCUAA | 1067-1088 |
| NO: 219 | UGAUGG | NO: 319 | UAAU | |
| SEQ ID | AAUACAUAGGAAAUUCA | SEQ ID | AACUUGAAUUUCCUAUG | 2210-2231 |
| NO: 220 | AGUUUA | NO: 320 | UAUU | |
| SEQ ID | AACUGUUGUUUACUUAG | SEQ ID | UGCUCUAAGUAAACAAC | 1039-1060 |
| NO: 221 | AGCAGA | NO: 321 | AGUU | |
| SEQ ID | GGAAAUUCAAGUUUACA | SEQ ID | GCUAUGUAAACUUGAAU | 2202-2223 |
| NO: 222 | UAGCAU | NO: 322 | UUCC | |
| SEQ ID | UUUACUUAGAGCAGAGA | SEQ ID | GGUGUCUCUGCUCUAAG | 1031-1052 |
| NO: 223 | CACCUC | NO: 323 | UAAA | |
| SEQ ID | UAAUUAAAAGGCACAUU | SEQ ID | CAUGAAUGUGCCUUUUA | 2822-2843 |
| NO: 224 | CAUGCU | NO: 324 | AUUA | |
| SEQ ID | UUACUUAGAGCAGAGAC | SEQ ID | AGGUGUCUCUGCUCUAA | 1030-1051 |
| NO: 225 | ACCUCC | NO: 325 | GUAA | |
| SEQ ID | UUUCUUUUAAGGCACUU | SEQ ID | UCCAAAGUGCCUUAAAA | 3449-3470 |
| NO: 226 | UGGAAA | NO: 326 | GAAA | |
| SEQ ID | AGGAAAUUCAAGUUUAC | SEQ ID | CUAUGUAAACUUGAAUU | 2203-2224 |
| NO: 227 | AUAGCA | NO: 327 | UCCU | |
| SEQ ID | AGAGACACCUCCAAAAU | SEQ ID | CAGUAUUUUGGAGGUG | 1019-1040 |
| NO: 228 | ACUGAA | NO: 328 | UCUCU | |
| SEQ ID | AUUAAAAGGCACAUUCA | SEQ ID | AGCAUGAAUGUGCCUUU | 2820-2841 |
| NO: 229 | UGCUGG | NO: 329 | UAAU | |
| SEQ ID | GUUUACUUAGAGCAGAG | SEQ ID | GUGUCUCUGCUCUAAGU | 1032-1053 |
| NO: 230 | ACACCU | NO: 330 | AAAC | |
| SEQ ID | AAAAUGUCAUCAUCUUC | SEQ ID | AGGAGAAGAUGAUGAC | 1102-1123 |
| NO: 231 | UCCUCC | NO: 331 | AUUUU | |
| SEQ ID | ACUUAGAGCAGAGACAC | SEQ ID | GGAGGUGUCUCUGCUCU | 1028-1049 |
| NO: 232 | CUCCAA | NO: 332 | AAGU | |
| SEQ ID | CUUUACAUUCAGAAAUC | SEQ ID | GUCUGAUUUCUGAAUGU | 2034-2055 |
| NO: 233 | AGACAA | NO: 333 | AAAG | |
| SEQ ID | AUUGCAACGGAAAUGUG | SEQ ID | ACGGCACAUUUCCGUUG | 967-988 |
| NO: 234 | CCGUGG | NO: 334 | CAAU | |
| SEQ ID | CCCAAUAAUUAUUAGGA | SEQ ID | GAUUUCCUAAUAAUUAU | 1074-1095 |
| NO: 235 | AAUCCA | NO: 335 | UGGG | |
| SEQ ID | AGACACCUCCAAAAUAC | SEQ ID | UUCAGUAUUUUGGAGG | 1017-1038 |
| NO: 236 | UGAACA | NO: 336 | UGUCU | |
| SEQ ID | AAUUAUUAGGAAAUCCA | SEQ ID | UCAAUGGAUUUCCUAAU | 1068-1089 |
| NO: 237 | UUGAUG | NO: 337 | AAUU | |
| SEQ ID | UUCGGUCAAACCUCUGA | SEQ ID | AUCCUCAGAGGUUUGAC | 1224-1245 |
| NO: 238 | GGAUUG | NO: 338 | CGAA | |
| SEQ ID | UAGGUGAGUGAGUUCAA | SEQ ID | UGGUUUGAACUCACUCA | 1276-1297 |
| NO: 239 | ACCAUC | NO: 339 | CCUA | |
| SEQ ID | UUCUUUUAAGGCACUUU | SEQ ID | UUCCAAAGUGCCUUAAA | 3448-3469 |
| NO: 240 | GGAAAA | NO: 340 | AGAA | |
| SEQ ID | CUUUUAAGGCACUUUGG | SEQ ID | UUUUCCAAAGUGCCUUA | 3446-3467 |
| NO: 241 | AAAAGU | NO: 341 | AAAG | |
| SEQ ID | UGUUUACUUAGAGCAGA | SEQ ID | UGUCUCUGCUCUAAGUA | 1033-1054 |
| NO: 242 | GACACC | NO: 342 | AACA | |
| SEQ ID | AGGCACUUUGGAAAAGU | SEQ ID | CCUGACUUUUCCAAAGU | 3440-3461 |
| NO: 243 | CAGGAU | NO: 343 | GCCU | |
| SEQ ID | GAGCAGAGACACCUCCA | SEQ ID | AUUUUGGAGGUGUCUCU | 1023-1044 |
| NO: 244 | AAAUAC | NO: 344 | GCUC | |
| SEQ ID | GUAGGUGAGUGAGUUCA | SEQ ID | GGUUUGAACUCACUCAC | 1277-1298 |
| NO: 245 | AACCAU | NO: 345 | CUAC | |
| SEQ ID | UAGAGCAGAGACACCUC | SEQ ID | UUUGGAGGUGUCUCUGC | 1025-1046 |
| NO: 246 | CAAAAU | NO: 346 | UCUA | |
| SEQ ID | GUUGUUUACUUAGAGCA | SEQ ID | UCUCUGCUCUAAGUAAA | 1035-1056 |
| NO: 247 | GAGACA | NO: 347 | CAAC | |
| SEQ ID | UCCAUUGCAACGGAAAU | SEQ ID | GCACAUUUCCGUUGCAA | 970-991 |
| NO: 248 | GUGCCG | NO: 348 | UGGA | |
| SEQ ID | CUAAUUAAAAGGCACAU | SEQ ID | AUGAAUGUGCCUUUUAA | 2823-2844 |
| NO: 249 | UCAUGC | NO: 349 | UUAG | |
| SEQ ID | CAUUGCAACGGAAAUGU | SEQ ID | CGGCACAUUUCCGUUGC | 968-989 |
| NO: 250 | GCCGUG | NO: 350 | AAUG | |
| SEQ ID | AUGUCCACUGUGAUUUG | SEQ ID | UACCCAAAUCACAGUGG | 1330-1351 |
| NO: 251 | GGUAUA | NO: 351 | ACAU | |
| SEQ ID | GGUGUCCCGAUGUCCAC | SEQ ID | CACAGUGGACAUCGGGA | 1339-1360 |
| NO: 252 | UGUGAU | NO: 352 | CACC | |
| SEQ ID | UUGUUUACUUAGAGCAG | SEQ ID | GUCUCUGCUCUAAGUAA | 1034-1055 |
| NO: 253 | AGACAC | NO: 353 | ACAA | |
| SEQ ID | CACUUUGGAAAAGUCAG | SEQ ID | GAUCCUGACUUUUCCAA | 3437-3458 |
| NO: 254 | GAUCUG | NO: 354 | AGUG | |
| SEQ ID | AAUUAAAAGGCACAUUC | SEQ ID | GCAUGAAUGUGCCUUUU | 2821-2842 |
| NO: 255 | AUGCUG | NO: 355 | AAUU | |
| SEQ ID | ACCUCCAAAAUACUGAA | SEQ ID | UAUGUUCAGUAUUUUG | 1013-1034 |
| NO: 256 | CAUAAG | NO: 356 | GAGGU | |
| SEQ ID | CAAUAAUUAUUAGGAAA | SEQ ID | UGGAUUUCCUAAUAAUU | 1072-1093 |
| NO: 257 | UCCAUU | NO: 357 | AUUG | |
| SEQ ID | UACUUAGAGCAGAGACA | SEQ ID | GAGGUGUCUCUGCUCUA | 1029-1050 |
| NO: 258 | CCUCCA | NO: 358 | AGUA | |
| SEQ ID | GUAUCUCUGUACAUCCA | SEQ ID | GUGCUGGAUGUACAGAG | 1301-1322 |
| NO: 259 | GCACCU | NO: 359 | AUAC | |
| SEQ ID | AAACUGUUGUUUACUUA | SEQ ID | GCUCUAAGUAAACAACA | 1040-1061 |
| NO: 260 | GAGCAG | NO: 360 | GUUU | |
| SEQ ID | CUGUUGUUUACUUAGAG | SEQ ID | UCUGCUCUAAGUAAACA | 1037-1058 |
| NO: 261 | CAGAGA | NO: 361 | ACAG | |
| SEQ ID | ACACCUCCAAAAUACUG | SEQ ID | UGUUCAGUAUUUUGGA | 1015-1036 |
| NO: 262 | AACAUA | NO: 362 | GGUGU | |
| SEQ ID | AGAGCAGAGACACCUCC | SEQ ID | UUUUGGAGGUGUCUCUG | 1024-1045 |
| NO: 263 | AAAAUA | NO: 363 | CUCU | |
| SEQ ID | CCGAUGUCCACUGUGAU | SEQ ID | CCAAAUCACAGUGGACA | 1333-1354 |
| NO: 264 | UUGGGU | NO: 364 | UCGG | |
| SEQ ID | ACUGUUGUUUACUUAGA | SEQ ID | CUGCUCUAAGUAAACAA | 1038-1059 |
| NO: 265 | GCAGAG | NO: 365 | CAGU | |
| SEQ ID | CUUAGAGCAGAGACACC | SEQ ID | UGGAGGUGUCUCUGCUC | 1027-1048 |
| NO: 266 | UCCAAA | NO: 366 | UAAG | |
| SEQ ID | UCUUUUAAGGCACUUUG | SEQ ID | UUUCCAAAGUGCCUUAA | 3447-3468 |
| NO: 267 | GAAAAG | NO: 367 | AAGA | |
| SEQ ID | GGUAUCUCUGUACAUCC | SEQ ID | UGCUGGAUGUACAGAGA | 1302-1323 |
| NO: 268 | AGCACC | NO: 368 | UACC | |
| SEQ ID | GGCACUUUGGAAAAGUC | SEQ ID | UCCUGACUUUUCCAAAG | 3439-3460 |
| NO: 269 | AGGAUC | NO: 369 | UGCC | |
| SEQ ID | CCACCUUGUGAGGAGAG | SEQ ID | GCGUCUCUCCUCACAAG | 684-705 |
| NO: 270 | ACGCAG | NO: 370 | GUGG | |
| SEQ ID | CCAAUAAUUAUUAGGAA | SEQ ID | GGAUUUCCUAAUAAUUA | 1073-1094 |
| NO: 271 | AUCCAU | NO: 371 | UUGG | |
| SEQ ID | CCAUUGCAACGGAAAUG | SEQ ID | GGCACAUUUCCGUUGCA | 969-990 |
| NO: 272 | UGCCGU | NO: 372 | AUGG | |
| SEQ ID | GUCCACUGUGAUUUGGG | SEQ ID | UAUACCCAAAUCACAGU | 1328-1349 |
| NO: 273 | UAUACA | NO: 373 | GGAC | |
| SEQ ID | GAGACACCUCCAAAAUA | SEQ ID | UCAGUAUUUUGGAGGU | 1018-1039 |
| NO: 274 | CUGAAC | NO: 374 | GUCUC | |
| SEQ ID | UCCUUCAAGGCUUCUUG | SEQ ID | CUUUCAAGAAGCCUUGA | 862-883 |
| NO: 275 | AAAGCC | NO: 375 | AGGA | |
| SEQ ID | UCUCCUCCCCAGCCCCAA | SEQ ID | UUAUUGGGGCUGGGGA | 1087-1108 |
| NO: 276 | UAAUU | NO: 376 | GGAGA | |
| SEQ ID | GCUAGCUCGGUGUCCCG | SEQ ID | ACAUCGGGACACCGAGC | 1347-1368 |
| NO: 277 | AUGUCC | NO: 377 | UAGC | |
| SEQ ID | GCACUUUGGAAAAGUCA | SEQ ID | AUCCUGACUUUUCCAAA | 3438-3459 |
| NO: 278 | GGAUCU | NO: 378 | GUGC | |
| SEQ ID | UGUCCACUGUGAUUUGG | SEQ ID | AUACCCAAAUCACAGUG | 1329-1350 |
| NO: 279 | GUAUAC | NO: 379 | GACA | |
| SEQ ID | UGCUCCUGCCGGUUGCG | SEQ ID | AUUCCGCAACCGGCAGG | 718-739 |
| NO: 280 | GAAUGG | NO: 380 | AGCA | |
| SEQ ID | GGGUAUCUCUGUACAUC | SEQ ID | GCUGGAUGUACAGAGAU | 1303-1324 |
| NO: 281 | CAGCAC | NO: 381 | ACCC | |
| SEQ ID | ACCUUGUGAGGAGAGAC | SEQ ID | CUGCGUCUCUCCUCACA | 682-703 |
| NO: 282 | GCAGUC | NO: 382 | AGGU | |
| SEQ ID | GUCCCGAUGUCCACUGU | SEQ ID | AAUCACAGUGGACAUCG | 1336-1357 |
| NO: 283 | GAUUUG | NO: 383 | GGAC | |
| SEQ ID | UGUUGUUUACUUAGAGC | SEQ ID | CUCUGCUCUAAGUAAAC | 1036-1057 |
| NO: 284 | AGAGAC | NO: 384 | AACA | |
| SEQ ID | GACACCUCCAAAAUACU | SEQ ID | GUUCAGUAUUUUGGAG | 1016-1037 |
| NO: 285 | GAACAU | NO: 385 | GUGUC | |
| SEQ ID | UUCUCCUCCCCAGCCCCA | SEQ ID | UAUUGGGGCUGGGGAG | 1088-1109 |
| NO: 286 | AUAAU | NO: 386 | GAGAA | |
| SEQ ID | CCUCCAAAAUACUGAAC | SEQ ID | UUAUGUUCAGUAUUUU | 1012-1033 |
| NO: 287 | AUAAGG | NO: 387 | GGAGG | |
| SEQ ID | GAUGUCCACUGUGAUUU | SEQ ID | ACCCAAAUCACAGUGGA | 1331-1352 |
| NO: 288 | GGGUAU | NO: 388 | CAUC | |
| SEQ ID | CCCCAAUAAUUAUUAGG | SEQ ID | AUUUCCUAAUAAUUAUU | 1075-1096 |
| NO: 289 | AAAUCC | NO: 389 | GGGG | |
| SEQ ID | CGGUGUCCCGAUGUCCAC | SEQ ID | ACAGUGGACAUCGGGAC | 1340-1361 |
| NO: 290 | UGUGA | NO: 390 | ACCG | |
| SEQ ID | UCCACUGUGAUUUGGGU | SEQ ID | GUAUACCCAAAUCACAG | 1327-1348 |
| NO: 291 | AUACAA | NO: 391 | UGGA | |
| SEQ ID | AUCUUCUCCUCCCCAGCC | SEQ ID | UGGGGCUGGGGAGGAG | 1091-1112 |
| NO: 292 | CCAAU | NO: 392 | AAGAU | |
| SEQ ID | CACCUCCAAAAUACUGA | SEQ ID | AUGUUCAGUAUUUUGG | 1014-1035 |
| NO: 293 | ACAUAA | NO: 393 | AGGUG | |
| SEQ ID | CUAGCUCGGUGUCCCGA | SEQ ID | GACAUCGGGACACCGAG | 1346-1367 |
| NO: 294 | UGUCCA | NO: 394 | CUAG | |
| SEQ ID | CUCGGUGUCCCGAUGUCC | SEQ ID | AGUGGACAUCGGGACAC | 1342-1363 |
| NO: 295 | ACUGU | NO: 395 | CGAG | |
| SEQ ID | CUCCUCCCCAGCCCCAAU | SEQ ID | AUUAUUGGGGCUGGGG | 1086-1107 |
| NO: 296 | AAUUA | NO: 396 | AGGAG | |
| SEQ ID | CAUCUUCUCCUCCCCAGC | SEQ ID | GGGGCUGGGGAGGAGA | 1092-1113 |
| NO: 297 | CCCAA | NO: 397 | AGAUG | |
| SEQ ID | CCUUGUGAGGAGAGACG | SEQ ID | ACUGCGUCUCUCCUCAC | 681-702 |
| NO: 298 | CAGUCC | NO: 398 | AAGG | |
| SEQ ID | UCCCCAGCCCCAAUAAUU | SEQ ID | AAUAAUUAUUGGGGCU | 1082-1103 |
| NO: 299 | AUUAG | NO: 399 | GGGGA | |
| SEQ ID | GUGUCCCGAUGUCCACU | SEQ ID | UCACAGUGGACAUCGGG | 1338-1359 |
| NO: 300 | GUGAUU | NO: 400 | ACAC | |
| SEQ ID | CACCUUGUGAGGAGAGA | SEQ ID | UGCGUCUCUCCUCACAA | 683-704 |
| NO: 301 | CGCAGU | NO: 401 | GGUG | |

[0181] In a particular embodiment, the invention relates to a nucleic acid comprising first and second strands that comprise, consist of, or consist essentially of a nucleoside sequence differing by 0 or 1 nucleosides from any one of the following first and second sequences:

| Unmodified first strand | Unmodified second strand |
|---|---|
| SEQ ID NO: 202 | SEQ ID NO: 302 |
| SEQ ID NO: 205 | SEQ ID NO: 305 |
| SEQ ID NO: 217 | SEQ ID NO: 317 |
| SEQ ID NO: 228 | SEQ ID NO: 328 |

[0182] In certain embodiments, the nucleic acid for inhibiting expression of B4GALT1 comprises a duplex region that comprises a first strand and a second strand that is at least partially complementary to the first strand, wherein said first strand is:
[0183] (i) at least partially complementary to a portion of RNA transcribed from the B4GALT1 gene, and
[0184] (ii) comprises at least 17 contiguous nucleosides differing by 0 or 1 nucleosides from any one of SEQ ID NOs: 62-81 or SEQ ID NOs: 402-513.

[0185] In certain embodiments, the first strand comprises nucleosides 2-18 of any one of the sequences set forth in SEQ ID NOs: 62-81 or SEQ ID NOs: 402-513.

[0186] In certain embodiments, the nucleic acid for inhibiting expression of B4GALT1 comprises a duplex region that comprises a first strand and a second strand that is at least partially complementary to the first strand, wherein said first strand is:
[0187] (i) at least partially complementary to a portion of RNA transcribed from the B4GALT1 gene, and
[0188] (ii) comprises at least 21 contiguous nucleosides differing by 0 or 1 nucleosides from any one of SEQ ID NOs: 402-513.

[0189] In certain embodiments, the first strand comprises nucleosides 2-22 of any one of the sequences set forth in SEQ ID NOs: 402-513.

[0190] In certain embodiments, the first strand comprises any one of SEQ ID NOs: 62-81 or SEQ ID NOs: 402-513.

[0191] The modification pattern of the nucleic acids as set forth in SEQ ID NOs: 62-81 and SEQ ID NOs: 402-513 is summarized in Table 3 below:

TABLE 3

| | | | Underlying Base Sequence | |
|---|---|---|---|---|
| | | SEQ ID | 5′ → 3′ | SEQ ID |
| Antisense | Modified First (Antisense) Strand | NO (AS - | (Shown as an Unmodified | NO (AS - |
| strand ID | 5′ → 3′ | mod) | Nucleoside Sequence) | unmod) |
| ETXS1238 | AmsAfsUmAfCmAfUmAfGmGfAmAfA | SEQ ID | AAUACAUAGGAAAUUC | SEQ ID |
| | mUfUmCfAmsAfsGm | NO: 62 | AAG | NO: 22 |
| ETXS1240 | AmsAfsUmUfAmUfUmAfGmGfAmAfA | SEQ ID | AAUUAUUAGGAAAUCC | SEQ ID |
| | mUfCmCfAmsUfsUm | NO: 63 | AUU | NO: 23 |
| ETXS1242 | GmsAfsCmAfCmCfUmCfCmAfAmAfAm | SEQ ID | GACACCUCCAAAAUAC | SEQ ID |
| | UfAmCfUmsGfsAm | NO: 64 | UGA | NO: 24 |
| ETXS1244 | AmsUfsAmAfUmUfAmUfUmAfGmGfA | SEQ ID | AUAAUUAUUAGGAAAU | SEQ ID |
| | mAfAmUfCmsCfsAm | NO: 65 | CCA | NO: 25 |
| ETXS1246 | AmsAfsAmAfUmAfCmAfUmAfGmGfA | SEQ ID | AAAAUACAUAGGAAAU | SEQ ID |
| | mAfAmUfUmsCfsAm | NO: 66 | UCA | NO: 26 |
| ETXS1248 | GmsUfsAmUfCmUfCmUfGmUfAmCfA | SEQ ID | GUAUCUCUGUACAUCC | SEQ ID |
| | mUfCmCfAmsGfsCm | NO: 67 | AGC | NO: 27 |
| ETXS1250 | UmsUfsCmUfUmUfUmAfAmGfGmCfA | SEQ ID | UUCUUUUAAGGCACUU | SEQ ID |
| | mCfUmUfUmsGfsGm | NO: 68 | UGG | NO: 28 |
| ETXS1252 | GmsGfsAmAfAmUfUmCfAmAfGmUfU | SEQ ID | GGAAAUUCAAGUUUAC | SEQ ID |
| | mUfAmCfAmsUfsAm | NO: 69 | AUA | NO: 29 |
| ETXS1254 | AmsUfsUmGfCmAfAmCfGmGfAmAfA | SEQ ID | AUUGCAACGGAAAUGU | SEQ ID |
| | mUfGmUfGmsCfsCm | NO: 70 | GCC | NO: 30 |
| ETXS1256 | AmsGfsGmAfAmAfUmUfCmAfAmGfU | SEQ ID | AGGAAAUUCAAGUUUA | SEQ ID |
| | mUfUmAfCmsAfsUm | NO: 71 | CAU | NO: 31 |
| ETXS1258 | UmsAfsAmUfUmAfUmUfAmGfGmAfA | SEQ ID | UAAUUAUUAGGAAAUC | SEQ ID |
| | mAfUmCfCmsAfsUm | NO: 72 | CAU | NO: 32 |
| ETXS1260 | UmsUfsUmAfCmUfUmAfGmAfGmCfA | SEQ ID | UUUACUUAGAGCAGAG | SEQ ID |
| | mGfAmGfAmsCfsAm | NO: 73 | ACA | NO: 33 |
| ETXS1262 | UmsUfsUmCfUmUfUmUfAmAfGmGfC | SEQ ID | UUUCUUUUAAGGCACU | SEQ ID |
| | mAfCmUfUmsUfsGm | NO: 74 | UUG | NO: 34 |
| ETXS1264 | UmsAfsAmUfUmAfAmAfAmGfGmCfA | SEQ ID | UAAUUAAAAGGCACAU | SEQ ID |
| | mCfAmUfUmsCfsAm | NO: 75 | UCA | NO: 35 |
| ETXS1266 | AmsUfsAmCfAmUfAmGfGmAfAmAfU | SEQ ID | AUACAUAGGAAAUUCA | SEQ ID |
| | mUfCmAfAmsGfsUm | NO: 76 | AGU | NO: 36 |
| ETXS1268 | GmsGfsCmAfCmUfUmUfGmGfAmAfA | SEQ ID | GGCACUUUGGAAAAGU | SEQ ID |
| | mAfGmUfCmsAfsGm | NO: 77 | CAG | NO: 37 |
| ETXS1270 | AmsUfsUmAfUmUfAmGfGmAfAmAfU | SEQ ID | AUUAUUAGGAAAUCCA | SEQ ID |
| | mCfCmAfUmsUfsGm | NO: 78 | UUG | NO: 38 |
| ETXS1272 | AmsCfsAmCfCmUfCmCfAmAfAmAfUm | SEQ ID | ACACCUCCAAAAUACU | SEQ ID |
| | AfCmUfGmsAfsAm | NO: 79 | GAA | NO: 39 |
| ETXS1274 | GmsCfsAmCfUmUfUmGfGmAfAmAfA | SEQ ID | GCACUUUGGAAAAGUC | SEQ ID |
| | mGfUmCfAmsGfsGm | NO: 80 | AGG | NO: 40 |
| ETXS1276 | AmsAfsUmAfAmUfUmAfUmUfAmGfG | SEQ ID | AAUAAUUAUUAGGAAA | SEQ ID |
| | mAfAmAfUmsCfsCm | NO: 81 | UCC | NO: 41 |
| ETXS1038 | AmsAfsUmAmCmAfUmAfGfGmAmAm | SEQ ID | AAUACAUAGGAAAUUC | SEQ ID |
| | AmUfUmCfAmAmGmUmUmsUmsAm | NO: 402 | AAGUUUA | NO: 220 |
| ETXS1040 | AmsAfsUmUmAmUfUmAfGfGmAmAm | SEQ ID | AAUUAUUAGGAAAUCC | SEQ ID |
| | AmUfCmCfAmUmUmGmAmsUmsGm | NO: 403 | AUUGAUG | NO: 237 |
| ETXS1042 | GmsAfsCmAmCmCfUmCfCfAmAmAm | SEQ ID | GACACCUCCAAAAUAC | SEQ ID |
| | AmUfAmCfUmGmAmAmCmsAmsUm | NO: 404 | UGAACAU | NO: 285 |
| ETXS1044 | AmsUfsAmAmUmUfAmUfUfAmGmGm | SEQ ID | AUAAUUAUUAGGAAAU | SEQ ID |
| | AmAfAmUfCmCmAmUmUmsGmsAm | NO: 405 | CCAUUGA | NO: 211 |
| ETXS1046 | AmsAfsAmAmUmAfCmAfUfAmGmGm | SEQ ID | AAAAUACAUAGGAAAU | SEQ ID |
| | AmAfAmUfUmCmAmAmGmsUmsUm | NO: 406 | UCAAGUU | NO: 205 |
| ETXS1048 | GmsUfsAmUmCmUfCmUfGfUmAmCm | SEQ ID | GUAUCUCUGUACAUCC | SEQ ID |
| | AmUfCmCfAmGmCmAmCmsCmsUm | NO: 407 | AGCACCU | NO: 259 |
| ETXS1050 | UmsUfsCmUmUmUfUmAfAfGmGmCm | SEQ ID | UUCUUUUAAGGCACUU | SEQ ID |
| | AmCfUmUfUmGmGmAmAmsAmsAm | NO: 408 | UGGAAAA | NO: 240 |
| ETXS1052 | GmsGfsAmAmAmUfUmCfAfAmGmUm | SEQ ID | GGAAAUUCAAGUUUAC | SEQ ID |
| | UmUfAmCfAmUmAmGmCmsAmsUm | NO: 409 | AUAGCAU | NO: 222 |
| ETXS1054 | AmsUfsUmGmCmAfAmCfGfGmAmAm | SEQ ID | AUUGCAACGGAAAUGU | SEQ ID |
| | AmUfGmUfGmCmCmGmUmsGmsGm | NO: 410 | GCCGUGG | NO: 234 |
| ETXS1056 | AmsGfsGmAmAmAfUmUfCfAmAmGm | SEQ ID | AGGAAAUUCAAGUUUA | SEQ ID |
| | UmUfUmAfCmAmUmAmGmsCmsAm | NO: 411 | CAUAGCA | NO: 227 |
| ETXS1058 | UmsAfsAmUmUmAfUmUfAfGmGmAm | SEQ ID | UAAUUAUUAGGAAAUC | SEQ ID |
| | AmAfUmCfCmAmUmUmGmsAmsUm | NO: 412 | CAUUGAU | NO: 216 |
| ETXS1060 | UmsUfsUmAmCmUfUmAfGfAmGmCm | SEQ ID | UUUACUUAGAGCAGAG | SEQ ID |
| | AmGfAmGfAmCmAmCmCmsUmsCm | NO: 413 | ACACCUC | NO: 223 |
| ETXS1062 | UmsUfsUmCmUmUfUmUfAfAmGmGm | SEQ ID | UUUCUUUUAAGGCACU | SEQ ID |
| | CmAfCmUfUmUmGmGmAmsAmsAm | NO: 414 | UUGGAAA | NO: 226 |
| ETXS1064 | UmsAfsAmUmUmAfAmAfAfGmGmCm | SEQ ID | UAAUUAAAAGGCACAU | SEQ ID |
| | AmCfAmUfUmCmAmUmGmsCmsUm | NO: 415 | UCAUGCU | NO: 224 |
| ETXS1066 | AmsUfsAmCmAmUfAmGfGfAmAmAm | SEQ ID | AUACAUAGGAAAUUCA | SEQ ID |
| | UmUfCmAfAmGmUmUmUmsAmsCm | NO: 416 | AGUUUAC | NO: 202 |
| ETXS1068 | GmsGfsCmAmCmUfUmUfGfGmAmAm | SEQ ID | GGCACUUUGGAAAAGU | SEQ ID |
| | AmAfGmUfCmAmGmGmAmsUmsCm | NO: 417 | CAGGAUC | NO: 269 |
| ETXS1070 | AmsUfsUmAmUmUfAmGfGfAmAmAm | SEQ ID | AUUAUUAGGAAAUCCA | SEQ ID |
| | UmCfCmAfUmUmGmAmUmsGmsGm | NO: 418 | UUGAUGG | NO: 219 |
| ETXS1072 | AmsCfsAmCmCmUfCmCfAfAmAmAm | SEQ ID | ACACCUCCAAAAUACU | SEQ ID |
| | UmAfCmUfGmAmAmCmAmsUmsAm | NO: 419 | GAACAUA | NO: 262 |
| ETXS1074 | GmsCfsAmCmUmUfUmGfGfAmAmAm | SEQ ID | GCACUUUGGAAAAGUC | SEQ ID |
| | AmGfUmCfAmGmGmAmUmsCmsUm | NO: 420 | AGGAUCU | NO: 278 |
| ETXS1076 | AmsAfsUmAmAmUfUmAfUfUmAmGm | SEQ ID | AAUAAUUAUUAGGAAA | SEQ ID |
| | GmAfAmAfUmCmCmAmUmsUmsGm | NO: 421 | UCCAUUG | NO: 212 |
| ETXS1078 | AmsUfsUmAmAmAfAmGfGfCmAmCm | SEQ ID | AUUAAAAGGCACAUUC | SEQ ID |
| | AmUfUmCfAmUmGmCmUmsGmsGm | NO: 422 | AUGCUGG | NO: 229 |
| ETXS1080 | UmsGfsUmUmUmAfCmUfUfAmGmAm | SEQ ID | UGUUUACUUAGAGCAG | SEQ ID |
| | GmCfAmGfAmGmAmCmAmsCmsCm | NO: 423 | AGACACC | NO: 242 |
| ETXS1082 | CmsAfsCmCmUmCfCmAfAfAmAmUm | SEQ ID | CACCUCCAAAAUACUG | SEQ ID |
| | AmCfUmGfAmAmCmAmUmsAmsAm | NO: 424 | AACAUAA | NO: 293 |
| ETXS1084 | CmsAfsCmUmUmUfGmGfAfAmAmAm | SEQ ID | CACUUUGGAAAAGUCA | SEQ ID |
| | GmUfCmAfGmGmAmUmCmsUmsGm | NO: 425 | GGAUCUG | NO: 254 |
| ETXS1086 | AmsAfsAmUmUmCfAmAfGfUmUmUm | SEQ ID | AAAUUCAAGUUUACAU | SEQ ID |
| | AmCfAmUfAmGmCmAmUmsGmsCm | NO: 426 | AGCAUGC | NO: 208 |
| ETXS1088 | AmsAfsAmCmUmGfUmUfGfUmUmUm | SEQ ID | AAACUGUUGUUUACUU | SEQ ID |
| | AmCfUmUfAmGmAmGmCmsAmsGm | NO: 427 | AGAGCAG | NO: 260 |
| ETXS1090 | GmsGfsGmUmAmUfCmUfCfUmGmUm | SEQ ID | GGGUAUCUCUGUACAU | SEQ ID |
| | AmCfAmUfCmCmAmGmCmsAmsCm | NO: 428 | CCAGCAC | NO: 281 |
| ETXS1092 | GmsUfsUmGmUmUfUmAfCfUmUmAm | SEQ ID | GUUGUUUACUUAGAGC | SEQ ID |
| | GmAfGmCfAmGmAmGmAmsCmsAm | NO: 429 | AGAGACA | NO: 247 |
| ETXS1094 | UmsAfsGmGmAmAfAmUfUfCmAmAm | SEQ ID | UAGGAAAUUCAAGUUU | SEQ ID |
| | GmUfUmUfAmCmAmUmAmsGmsCm | NO: 430 | ACAUAGC | NO: 203 |
| ETXS1096 | AmsUfsGmUmCmCfAmCfUfGmUmGm | SEQ ID | AUGUCCACUGUGAUUU | SEQ ID |
| | AmUfUmUfGmGmGmUmAmsUmsAm | NO: 431 | GGGUAUA | NO: 251 |
| ETXS1098 | AmsUfsUmCmGmGfUmCfAfAmAmCm | SEQ ID | AUUCGGUCAAACCUCU | SEQ ID |
| | CmUfCmUfGmAmGmGmAmsUmsUm | NO: 432 | GAGGAUU | NO: 215 |
| ETXS1100 | AmsAfsAmUmAmCfAmUfAfGmGmAm | SEQ ID | AAAUACAUAGGAAAUU | SEQ ID |
| | AmAfUmUfCmAmAmGmUmsUmsUm | NO: 433 | CAAGUUU | NO: 206 |
| ETXS1102 | CmsUfsAmAmUmUfAmAfAfAmGmGm | SEQ ID | CUAAUUAAAAGGCACA | SEQ ID |
| | CmAfCmAfUmUmCmAmUmsGmsCm | NO: 434 | UUCAUGC | NO: 249 |
| ETXS1104 | CmsCfsAmCmCmUfUmGfUfGmAmGm | SEQ ID | CCACCUUGUGAGGAGA | SEQ ID |
| | GmAfGmAfGmAmCmGmCmsAmsGm | NO: 435 | GACGCAG | NO: 270 |
| ETXS1106 | UmsGfsUmCmCmAfCmUfGfUmGmAm | SEQ ID | UGUCCACUGUGAUUUG | SEQ ID |
| | UmUfUmGfGmGmUmAmUmsAmsCm | NO: 436 | GGUAUAC | NO: 279 |
| ETXS1108 | UmsAfsCmAmUmAfGmGfAfAmAmUm | SEQ ID | UACAUAGGAAAUUCAA | SEQ ID |
| | UmCfAmAfGmUmUmUmAmsCmsAm | NO: 437 | GUUUACA | NO: 210 |
| ETXS1110 | CmsUfsUmUmAmCfAmUfUfCmAmGm | SEQ ID | CUUUACAUUCAGAAAU | SEQ ID |
| | AmAfAmUfCmAmGmAmCmsAmsAm | NO: 438 | CAGACAA | NO: 233 |
| ETXS1112 | CmsCfsAmAmUmAfAmUfUfAmUmUm | SEQ ID | CCAAUAAUUAUUAGGA | SEQ ID |
| | AmGfGmAfAmAmUmCmCmsAmsUm | NO: 439 | AAUCCAU | NO: 271 |
| ETXS1114 | UmsGfsCmUmCmCfUmGfCfCmGmGm | SEQ ID | UGCUCCUGCCGGUUGC | SEQ ID |
| | UmUfGmCfGmGmAmAmUmsGmsGm | NO: 440 | GGAAUGG | NO: 280 |
| ETXS1116 | UmsUfsGmUmUmUfAmCfUfUmAmGm | SEQ ID | UUGUUUACUUAGAGCA | SEQ ID |
| | AmGfCmAfGmAmGmAmCmsAmsCm | NO: 441 | GAGACAC | NO: 253 |
| ETXS1118 | AmsCfsUmGmUmUfGmUfUfUmAmCm | SEQ ID | ACUGUUGUUUACUUAG | SEQ ID |
| | UmUfAmGfAmGmCmAmGmsAmsGm | NO: 442 | AGCAGAG | NO: 265 |
| ETXS1120 | CmsUfsUmUmUmAfAmGfGfCmAmCm | SEQ ID | CUUUUAAGGCACUUUG | SEQ ID |
| | UmUfUmGfGmAmAmAmAmsGmsUm | NO: 443 | GAAAAGU | NO: 241 |
| ETXS1122 | AmsCfsCmUmCmCfAmAfAfAmUmAm | SEQ ID | ACCUCCAAAAUACUGA | SEQ ID |
| | CmUfGmAfAmCmAmUmAmsAmsGm | NO: 444 | ACAUAAG | NO: 256 |
| ETXS1124 | CmsGfsGmUmGmUfCmCfCfGmAmUm | SEQ ID | CGGUGUCCCGAUGUCC | SEQ ID |
| | GmUfCmCfAmCmUmGmUmsGmsAm | NO: 445 | ACUGUGA | NO: 290 |
| ETXS1126 | CmsCfsCmCmAmAfUmAfAfUmUmAm | SEQ ID | CCCCAAUAAUUAUUAG | SEQ ID |
| | UmUfAmGfGmAmAmAmUmsCmsCm | NO: 446 | GAAAUCC | NO: 289 |
| ETXS1128 | GmsAfsUmGmUmCfCmAfCfUmGmUm | SEQ ID | GAUGUCCACUGUGAUU | SEQ ID |
| | GmAfUmUfUmGmGmGmUmsAmsUm | NO: 447 | UGGGUAU | NO: 288 |
| ETXS1130 | UmsAfsGmAmGmCfAmGfAfGmAmCm | SEQ ID | UAGAGCAGAGACACCU | SEQ ID |
| | AmCfCmUfCmCmAmAmAmsAmsUm | NO: 448 | CCAAAAU | NO: 246 |
| ETXS1132 | CmsCfsGmAmUmGfUmCfCfAmCmUm | SEQ ID | CCGAUGUCCACUGUGA | SEQ ID |
| | GmUfGmAfUmUmUmGmGmsGmsUm | NO: 449 | UUUGGGU | NO: 264 |
| ETXS1134 | UmsCfsUmUmUmUfAmAfGfGmCmAm | SEQ ID | UCUUUUAAGGCACUUU | SEQ ID |
| | CmUfUmUfGmGmAmAmAmsAmsGm | NO: 450 | GGAAAAG | NO: 267 |
| ETXS1136 | CmsCfsCmAmAmUfAmAfUfUmAmUm | SEQ ID | CCCAAUAAUUAUUAGG | SEQ ID |
| | UmAfGmGfAmAmAmUmCmsCmsAm | NO: 451 | AAAUCCA | NO: 235 |
| ETXS1138 | GmsUfsCmCmAmCfUmGfUfGmAmUm | SEQ ID | GUCCACUGUGAUUUGG | SEQ ID |
| | UmUfGmGfGmUmAmUmAmsCmsAm | NO: 452 | GUAUACA | NO: 273 |
| ETXS1140 | GmsUfsAmGmGmUfGmAfGfUmGmAm | SEQ ID | GUAGGUGAGUGAGUUC | SEQ ID |
| | GmUfUmCfAmAmAmCmCmsAmsUm | NO: 453 | AAACCAU | NO: 245 |
| ETXS1142 | AmsCfsUmUmAmGfAmGfCfAmGmAm | SEQ ID | ACUUAGAGCAGAGACA | SEQ ID |
| | GmAfCmAfCmCmUmCmCmsAmsAm | NO: 454 | CCUCCAA | NO: 232 |
| ETXS1144 | CmsAfsCmCmUmUfGmUfGfAmGmGm | SEQ ID | CACCUUGUGAGGAGAG | SEQ ID |
| | AmGfAmGfAmCmGmCmAmsGmsUm | NO: 455 | ACGCAGU | NO: 301 |
| ETXS1146 | AmsAfsAmAmUmGfUmCfAfUmCmAm | SEQ ID | AAAAUGUCAUCAUCUU | SEQ ID |
| | UmCfUmUfCmUmCmCmUmsCmsCm | NO: 456 | CUCCUCC | NO: 231 |
| ETXS1148 | CmsUfsUmAmGmAfGmCfAfGmAmGm | SEQ ID | CUUAGAGCAGAGACAC | SEQ ID |
| | AmCfAmCfCmUmCmCmAmsAmsAm | NO: 457 | CUCCAAA | NO: 266 |
| ETXS1150 | UmsCfsUmCmCmUfCmCfCfCmAmGmC | SEQ ID | UCUCCUCCCCAGCCCCA | SEQ ID |
| | mCfCmCfAmAmUmAmAmsUmsUm | NO: 458 | AUAAUU | NO: 276 |
| ETXS1152 | AmsGfsGmCmAmCfUmUfUfGmGmAm | SEQ ID | AGGCACUUUGGAAAAG | SEQ ID |
| | AmAfAmGfUmCmAmGmGmsAmsUm | NO: 459 | UCAGGAU | NO: 243 |
| ETXS1154 | CmsCfsAmUmUmGfCmAfAfCmGmGm | SEQ ID | CCAUUGCAACGGAAAU | SEQ ID |
| | AmAfAmUfGmUmGmCmCmsGmsUm | NO: 460 | GUGCCGU | NO: 272 |
| ETXS1156 | AmsAfsCmUmGmUfUmGfUfUmUmAm | SEQ ID | AACUGUUGUUUACUUA | SEQ ID |
| | CmUfUmAfGmAmGmCmAmsGmsAm | NO: 461 | GAGCAGA | NO: 221 |
| ETXS1158 | UmsUfsAmGmAmGfCmAfGfAmGmAm | SEQ ID | UUAGAGCAGAGACACC | SEQ ID |
| | CmAfCmCfUmCmCmAmAmsAmsAm | NO: 462 | UCCAAAA | NO: 214 |
| ETXS1160 | GmsAfsAmAmUmUfCmAfAfGmUmUm | SEQ ID | GAAAUUCAAGUUUACA | SEQ ID |
| | UmAfCmAfUmAmGmCmAmsUmsGm | NO: 463 | UAGCAUG | NO: 218 |
| ETXS1162 | CmsAfsAmUmAmAfUmUfAfUmUmAm | SEQ ID | CAAUAAUUAUUAGGAA | SEQ ID |
| | GmGfAmAfAmUmCmCmAmsUmsUm | NO: 464 | AUCCAUU | NO: 257 |
| ETXS1164 | CmsUfsCmCmUmCfCmCfCfAmGmCmC | SEQ ID | CUCCUCCCCAGCCCCAA | SEQ ID |
| | mCfCmAfAmUmAmAmUmsUmsAm | NO: 465 | UAAUUA | NO: 296 |
| ETXS1166 | UmsUfsUmUmAmAfGmGfCfAmCmUm | SEQ ID | UUUUAAGGCACUUUGG | SEQ ID |
| | UmUfGmGfAmAmAmAmGmsUmsCm | NO: 466 | AAAAGUC | NO: 217 |
| ETXS1168 | UmsUfsCmUmCmCfUmCfCfCmCmAmG | SEQ ID | UUCUCCUCCCCAGCCCC | SEQ ID |
| | mCfCmCfCmAmAmUmAmsAmsUm | NO: 467 | AAUAAU | NO: 286 |
| ETXS1170 | CmsUfsAmGmCmUfCmGfGfUmGmUm | SEQ ID | CUAGCUCGGUGUCCCG | SEQ ID |
| | CmCfCmGfAmUmGmUmCmsCmsAm | NO: 468 | AUGUCCA | NO: 294 |
| ETXS1172 | AmsGfsAmCmAmCfCmUfCfCmAmAm | SEQ ID | AGACACCUCCAAAAUA | SEQ ID |
| | AmAfUmAfCmUmGmAmAmsCmsAm | NO: 469 | CUGAACA | NO: 236 |
| ETXS1174 | UmsAfsCmUmUmAfGmAfGfCmAmGm | SEQ ID | UACUUAGAGCAGAGAC | SEQ ID |
| | AmGfAmCfAmCmCmUmCmsCmsAm | NO: 470 | ACCUCCA | NO: 258 |
| ETXS1176 | UmsAfsGmGmUmGfAmGfUfGmAmGm | SEQ ID | UAGGUGAGUGAGUUCA | SEQ ID |
| | UmUfCmAfAmAmCmCmAmsUmsCm | NO: 471 | AACCAUC | NO: 239 |
| ETXS1178 | AmsCfsUmUmUmAfCmAfUfUmCmAm | SEQ ID | ACUUUACAUUCAGAAA | SEQ ID |
| | GmAfAmAfUmCmAmGmAmsCmsAm | NO: 472 | UCAGACA | NO: 209 |
| ETXS1180 | CmsAfsUmAmGmGfAmAfAfUmUmCm | SEQ ID | CAUAGGAAAUUCAAGU | SEQ ID |
| | AmAfGmUfUmUmAmCmAmsUmsAm | NO: 473 | UUACAUA | NO: 204 |
| ETXS1182 | GmsUfsUmUmAmCfUmUfAfGmAmGm | SEQ ID | GUUUACUUAGAGCAGA | SEQ ID |
| | CmAfGmAfGmAmCmAmCmsCmsUm | NO: 474 | GACACCU | NO: 230 |
| ETXS1184 | AmsCfsCmUmUmGfUmGfAfGmGmAm | SEQ ID | ACCUUGUGAGGAGAGA | SEQ ID |
| | GmAfGmAfCmGmCmAmGmsUmsCm | NO: 475 | CGCAGUC | NO: 282 |
| ETXS1186 | CmsCfsUmCmCmAfAmAfAfUmAmCm | SEQ ID | CCUCCAAAAUACUGAA | SEQ ID |
| | UmGfAmAfCmAmUmAmAmsGmsGm | NO: 476 | CAUAAGG | NO: 287 |
| ETXS1188 | GmsGfsUmGmUmCfCmCfGfAmUmGm | SEQ ID | GGUGUCCCGAUGUCCA | SEQ ID |
| | UmCfCmAfCmUmGmUmGmsAmsUm | NO: 477 | CUGUGAU | NO: 252 |
| ETXS1190 | CmsUfsGmUmUmGfUmUfUfAmCmUm | SEQ ID | CUGUUGUUUACUUAGA | SEQ ID |
| | UmAfGmAfGmCmAmGmAmsGmsAm | NO: 478 | GCAGAGA | NO: 261 |
| ETXS1192 | CmsAfsUmUmGmCfAmAfCfGmGmAm | SEQ ID | CAUUGCAACGGAAAUG | SEQ ID |
| | AmAfUmGfUmGmCmCmGmsUmsGm | NO: 479 | UGCCGUG | NO: 250 |
| ETXS1194 | GmsAfsGmAmCmAfCmCfUfCmCmAm | SEQ ID | GAGACACCUCCAAAAU | SEQ ID |
| | AmAfAmUfAmCmUmGmAmsAmsCm | NO: 480 | ACUGAAC | NO: 274 |
| ETXS1196 | UmsCfsCmAmUmUfGmCfAfAmCmGm | SEQ ID | UCCAUUGCAACGGAAA | SEQ ID |
| | GmAfAmAfUmGmUmGmCmsCmsGm | NO: 481 | UGUGCCG | NO: 248 |
| ETXS1198 | AmsAfsUmUmCmAfAmGfUfUmUmAm | SEQ ID | AAUUCAAGUUUACAUA | SEQ ID |
| | CmAfUmAfGmCmAmUmGmsCmsCm | NO: 482 | GCAUGCC | NO: 213 |
| ETXS1200 | UmsUfsCmGmGmUfCmAfAfAmCmCm | SEQ ID | UUCGGUCAAACCUCUG | SEQ ID |
| | UmCfUmGfAmGmGmAmUmsUmsGm | NO: 483 | AGGAUUG | NO: 238 |
| ETXS1202 | GmsUfsGmUmCmCfCmGfAfUmGmUm | SEQ ID | GUGUCCCGAUGUCCAC | SEQ ID |
| | CmCfAmCfUmGmUmGmAmsUmsUm | NO: 484 | UGUGAUU | NO: 300 |
| ETXS1204 | UmsCfsCmUmUmCfAmAfGfGmCmUm | SEQ ID | UCCUUCAAGGCUUCUU | SEQ ID |
| | UmCfUmUfGmAmAmAmGmsCmsCm | NO: 485 | GAAAGCC | NO: 275 |
| ETXS1206 | UmsUfsAmCmUmUfAmGfAfGmCmAm | SEQ ID | UUACUUAGAGCAGAGA | SEQ ID |
| | GmAfGmAfCmAmCmCmUmsCmsCm | NO: 486 | CACCUCC | NO: 225 |
| ETXS1208 | AmsGfsAmGmCmAfGmAfGfAmCmAm | SEQ ID | AGAGCAGAGACACCUC | SEQ ID |
| | CmCfUmCfCmAmAmAmAmsUmsAm | NO: 487 | CAAAAUA | NO: 263 |
| ETXS1210 | AmsAfsUmUmAmAfAmAfGfGmCmAm | SEQ ID | AAUUAAAAGGCACAUU | SEQ ID |
| | CmAfUmUfCmAmUmGmCmsUmsGm | NO: 488 | CAUGCUG | NO: 255 |
| ETXS1212 | GmsCfsUmAmGmCfUmCfGfGmUmGm | SEQ ID | GCUAGCUCGGUGUCCC | SEQ ID |
| | UmCfCmCfGmAmUmGmUmsCmsCm | NO: 489 | GAUGUCC | NO: 277 |
| ETXS1214 | CmsCfsUmUmGmUfGmAfGfGmAmGm | SEQ ID | CCUUGUGAGGAGAGAC | SEQ ID |
| | AmGfAmCfGmCmAmGmUmsCmsCm | NO: 490 | GCAGUCC | NO: 298 |
| ETXS1216 | UmsCfsCmAmCmUfGmUfGfAmUmUm | SEQ ID | UCCACUGUGAUUUGGG | SEQ ID |
| | UmGfGmGfUmAmUmAmCmsAmsAm | NO: 491 | UAUACAA | NO: 291 |
| ETXS1218 | GmsGfsUmAmUmCfUmCfUfGmUmAm | SEQ ID | GGUAUCUCUGUACAUC | SEQ ID |
| | CmAfUmCfCmAmGmCmAmsCmsCm | NO: 492 | CAGCACC | NO: 268 |
| ETXS1220 | AmsUfsAmGmGmAfAmAfUfUmCmAm | SEQ ID | AUAGGAAAUUCAAGUU | SEQ ID |
| | AmGfUmUfUmAmCmAmUmsAmsGm | NO: 493 | UACAUAG | NO: 207 |
| ETXS1222 | CmsAfsUmCmUmUfCmUfCfCmUmCmC | SEQ ID | CAUCUUCUCCUCCCCA | SEQ ID |
| | mCfCmAfGmCmCmCmCmsAmsAm | NO: 494 | GCCCCAA | NO: 297 |
| ETXS1224 | UmsGfsUmUmGmUfUmUfAfCmUmUm | SEQ ID | UGUUGUUUACUUAGAG | SEQ ID |
| | AmGfAmGfCmAmGmAmGmsAmsCm | NO: 495 | CAGAGAC | NO: 284 |
| ETXS1226 | AmsUfsCmUmUmCfUmCfCfUmCmCmC | SEQ ID | AUCUUCUCCUCCCCAG | SEQ ID |
| | mCfAmGfCmCmCmCmAmsAmsUm | NO: 496 | CCCCAAU | NO: 292 |
| ETXS1228 | GmsUfsCmCmCmGfAmUfGfUmCmCm | SEQ ID | GUCCCGAUGUCCACUG | SEQ ID |
| | AmCfUmGfUmGmAmUmUmsUmsGm | NO: 497 | UGAUUUG | NO: 283 |
| ETXS1230 | CmsUfsCmGmGmUfGmUfCfCmCmGm | SEQ ID | CUCGGUGUCCCGAUGU | SEQ ID |
| | AmUfGmUfCmCmAmCmUmsGmsUm | NO: 498 | CCACUGU | NO: 295 |
| ETXS1232 | UmsCfsCmCmCmAfGmCfCfCmCmAmA | SEQ ID | UCCCCAGCCCCAAUAA | SEQ ID |
| | mUfAmAfUmUmAmUmUmsAmsGm | NO: 499 | UUAUUAG | NO: 299 |
| ETXS1234 | AmsGfsAmGmAmCfAmCfCfUmCmCm | SEQ ID | AGAGACACCUCCAAAA | SEQ ID |
| | AmAfAmAfUmAmCmUmGmsAmsAm | NO: 500 | UACUGAA | NO: 228 |
| ETXS1236 | GmsAfsGmCmAmGfAmGfAfCmAmCm | SEQ ID | GAGCAGAGACACCUCC | SEQ ID |
| | CmUfCmCfAmAmAmAmUmsAmsCm | NO: 501 | AAAAUAC | NO: 244 |
| ETXS2400 | AmsUfsAmCfAmUfAmGmGmAmAmA | SEQ ID | AUACAUAGGAAAUUCA | SEQ ID |
| | mUmUfCmAfAmGmUmUmUmsAmsCm | NO: 502 | AGUUUAC | NO: 202 |
| ETXS2402 | AmsUfsAmCmAmUfAmGmGfAmAmA | SEQ ID | AUACAUAGGAAAUUCA | SEQ ID |
| | mUmUfCmAfAmGmUmUmUmsAmsCm | NO: 503 | AGUUUAC | NO: 202 |
| ETXS2406 | AmsAfsAmAfUmAfCmAmUmAmGmG | SEQ ID | AAAAUACAUAGGAAAU | SEQ ID |
| | mAmAfAmUfUmCmAmAmGmsUmsUm | NO: 504 | UCAAGUU | NO: 205 |
| ETXS2408 | AmsAfsAmAmUmAfCmAmUfAmGmG | SEQ ID | AAAAUACAUAGGAAAU | SEQ ID |
| | mAmAfAmUfUmCmAmAmGmsUmsUm | NO: 505 | UCAAGUU | NO: 205 |
| ETXS2424 | UmsUfsUmUfAmAfGmGmCmAmCmUm | SEQ ID | UUUUAAGGCACUUUGG | SEQ ID |
| | UmUfGmGfAmAmAmAmGmsUmsCm | NO: 506 | AAAAGUC | NO: 217 |
| ETXS2426 | UmsUfsUmUmAmAfGmGmCfAmCmUm | SEQ ID | UUUUAAGGCACUUUGG | SEQ ID |
| | UmUfGmGfAmAmAmAmGmsUmsCm | NO: 507 | AAAAGUC | NO: 217 |
| ETXS2430 | AmsGfsAmGfAmCfAmCmCmUmCmCm | SEQ ID | AGAGACACCUCCAAAA | SEQ ID |
| | AmAfAmAfUmAmCmUmGmsAmsAm | NO: 508 | UACUGAA | NO: 228 |
| ETXS2432 | AmsGfsAmGmAmCfAmCmCfUmCmCm | SEQ ID | AGAGACACCUCCAAAA | SEQ ID |
| | AmAfAmAfUmAmCmUmGmsAmsAm | NO: 509 | UACUGAA | NO: 228 |
| ETXS2434 | AmsUfsAmCmAmUfAmGmGmAmAmA | SEQ ID | AUACAUAGGAAAUUCA | SEQ ID |
| | mUmUfCmAfAmGfUmUmUmsAmsCm | NO: 510 | AGUUUAC | NO: 202 |
| ETXS2436 | AmsAfsAmAmUmAfCmAmUmAmGmG | SEQ ID | AAAAUACAUAGGAAAU | SEQ ID |
| | mAmAfAmUfUmCfAmAmGmsUmsUm | NO: 511 | UCAAGUU | NO: 205 |
| ETXS2438 | UmsUfsUmUmAmAfGmGmCmAmCmU | SEQ ID | UUUUAAGGCACUUUGG | SEQ ID |
| | mUmUfGmGfAmAfAmAmGmsUmsCm | NO: 512 | AAAAGUC | NO: 217 |
| ETXS2440 | AmsGfsAmGmAmCfAmCmCmUmCmC | SEQ ID | AGAGACACCUCCAAAA | SEQ ID |
| | mAmAfAmAfUmAfCmUmGmsAmsAm | NO: 513 | UACUGAA | NO: 228 |

[0192] In certain embodiments, the second strand comprises a nucleoside sequence of at least 17 contiguous nucleosides differing by 0 or 1 nucleosides from any one of SEQ ID NOs:_82-101 or SEQ ID NOs: 514-621; wherein the second strand has a region of at least 85% complementarity over the 17 contiguous nucleosides to the first strand.

[0193] In certain embodiments, the second strand comprises a nucleoside sequence of at least 19 contiguous nucleosides differing by 0 or 1 nucleosides from any one of SEQ ID NOs: 514-621; wherein the second strand has a region of at least 85% complementarity over the 19 contiguous nucleosides to the first strand.

[0194] In certain embodiments, the second strand comprises a nucleoside sequence of at least 21 contiguous nucleosides differing by 0 or 1 nucleosides from any one of SEQ ID NOs: 514-621; wherein the second strand has a region of at least 85% complementarity over the 21 contiguous nucleosides to the first strand.

[0195] In certain embodiments, the second strand comprises any one of SEQ ID NOs: 82-101 or SEQ ID NOs: 514-621.

[0196] The modification pattern of the nucleic acids as set forth in SEQ ID NOs: 82-101 and SEQ ID NOs: 514-621 is summarized in Table 4 below:

TABLE 4

| | | | Underlying Base Sequence | |
|---|---|---|---|---|
| | | SEQ ID | 5′ → 3′ | SEQ ID |
| Sense | Modified Second (Sense) Strand | NO (SS - | (Shown as an Unmodified | NO (SS - |
| strand ID | 5′ → 3′ | mod) | Nucleoside Sequence) | unmod) |
| ETXS1237 | CfsUmsUfGmAfAmUfUmUfCmCfUmAf | SEQ ID | CUUGAAUUUCCUAUGU | SEQ ID |
| | UmGfUmAfUmUf | NO: 82 | AUU | NO: 42 |
| ETXS1239 | AfsAmsUfGmGfAmUfUmUfCmCfUmAf | SEQ ID | AAUGGAUUUCCUAAUA | SEQ ID |
| | AmUfAmAfUmUf | NO: 83 | AUU | NO: 43 |
| ETXS1241 | UfsCmsAfGmUfAmUfUmUfUmGfGmAf | SEQ ID | UCAGUAUUUUGGAGGU | SEQ ID |
| | GmGfUmGfUmCf | NO: 84 | GUC | NO: 44 |
| ETXS1243 | UfsGmsGfAmUfUmUfCmCfUmAfAmUf | SEQ ID | UGGAUUUCCUAAUAAU | SEQ ID |
| | AmAfUmUfAmUf | NO: 85 | UAU | NO: 45 |
| ETXS1245 | UfsGmsAfAmUfUmUfCmCfUmAfUmGf | SEQ ID | UGAAUUUCCUAUGUAU | SEQ ID |
| | UmAfUmUfUmUf | NO: 86 | UUU | NO: 46 |
| ETXS1247 | GfsCmsUfGmGfAmUfGmUfAmCfAmGf | SEQ ID | GCUGGAUGUACAGAGA | SEQ ID |
| | AmGfAmUfAmCf | NO: 87 | UAC | NO: 47 |
| ETXS1249 | CfsCmsAfAmAfGmUfGmCfCmUfUmAf | SEQ ID | CCAAAGUGCCUUAAAA | SEQ ID |
| | AmAfAmGfAmAf | NO: 88 | GAA | NO: 48 |
| ETXS1251 | UfsAmsUfGmUfAmAfAmCfUmUfGmAf | SEQ ID | UAUGUAAACUUGAAUU | SEQ ID |
| | AmUfUmUfCmCf | NO: 89 | UCC | NO: 49 |
| ETXS1253 | GfsGmsCfAmCfAmUfUmUfCmCfGmUf | SEQ ID | GGCACAUUUCCGUUGC | SEQ ID |
| | UmGfCmAfAmUf | NO: 90 | AAU | NO: 50 |
| ETXS1255 | AfsUmsGfUmAfAmAfCmUfUmGfAmAf | SEQ ID | AUGUAAACUUGAAUUU | SEQ ID |
| | UmUfUmCfCmUf | NO: 91 | CCU | NO: 51 |
| ETXS1257 | AfsUmsGfGmAfUmUfUmCfCmUfAmAf | SEQ ID | AUGGAUUUCCUAAUAA | SEQ ID |
| | UmAfAmUfUmAf | NO: 92 | UUA | NO: 52 |
| ETXS1259 | UfsGmsUfCmUfCmUfGmCfUmCfUmAf | SEQ ID | UGUCUCUGCUCUAAGU | SEQ ID |
| | AmGfUmAfAmAf | NO: 93 | AAA | NO: 53 |
| ETXS1261 | CfsAmsAfAmGfUmGfCmCfUmUfAmAf | SEQ ID | CAAAGUGCCUUAAAAG | SEQ ID |
| | AmAfGmAfAmAf | NO: 94 | AAA | NO: 54 |
| ETXS1263 | UfsGmsAfAmUfGmUfGmCfCmUfUmUf | SEQ ID | UGAAUGUGCCUUUUAA | SEQ ID |
| | UmAfAmUfUmAf | NO: 95 | UUA | NO: 55 |
| ETXS1265 | AfsCmsUfUmGfAmAfUmUfUmCfCmUf | SEQ ID | ACUUGAAUUUCCUAUG | SEQ ID |
| | AmUfGmUfAmUf | NO: 96 | UAU | NO: 56 |
| ETXS1267 | CfsUmsGfAmCfUmUfUmUfCmCfAmAf | SEQ ID | CUGACUUUUCCAAAGU | SEQ ID |
| | AmGfUmGfCmCf | NO: 97 | GCC | NO: 57 |
| ETXS1269 | CfsAmsAfUmGfGmAfUmUfUmCfCmUf | SEQ ID | CAAUGGAUUUCCUAAU | SEQ ID |
| | AmAfUmAfAmUf | NO: 98 | AAU | NO: 58 |
| ETXS1271 | UfsUmsCfAmGfUmAfUmUfUmUfGmGf | SEQ ID | UUCAGUAUUUUGGAGG | SEQ ID |
| | AmGfGmUfGmUf | NO: 99 | UGU | NO: 59 |
| ETXS1273 | CfsCmsUfGmAfCmUfUmUfUmCfCmAf | SEQ ID | CCUGACUUUUCCAAAG | SEQ ID |
| | AmAfGmUfGmCf | NO: 100 | UGC | NO: 60 |
| ETXS1275 | GfsGmsAfUmUfUmCfCmUfAmAfUmAf | SEQ ID | GGAUUUCCUAAUAAUU | SEQ ID |
| | AmUfUmAfUmUf | NO: 101 | AUU | NO: 61 |
| ETXS1037 | AmsAmsCmUmUmGmAfAmUfUfUfCm | SEQ ID | AACUUGAAUUUCCUAU | SEQ ID |
| | CmUmAmUmGmUmAmUmUm | NO: 618 | GUAUU | NO: 320 |
| ETXS1039 | UmsCmsAmAmUmGmGfAmUfUfUfCm | SEQ ID | UCAAUGGAUUUCCUAA | SEQ ID |
| | CmUmAmAmUmAmAmUmUm | NO: 619 | UAAUU | NO: 337 |
| ETXS1041 | GmsUmsUmCmAmGmUfAmUfUfUfUm | SEQ ID | GUUCAGUAUUUUGGAG | SEQ ID |
| | GmGmAmGmGmUmGmUmCm | NO: 620 | GUGUC | NO: 385 |
| ETXS1043 | AmsAmsUmGmGmAmUfUmUfCfCfUm | SEQ ID | AAUGGAUUUCCUAAUA | SEQ ID |
| | AmAmUmAmAmUmUmAmUm | NO: 621 | AUUAU | NO: 311 |
| ETXS1045 | CmsUmsUmGmAmAmUfUmUfCfCfUm | SEQ ID | CUUGAAUUUCCUAUGU | SEQ ID |
| | AmUmGmUmAmUmUmUmUm | NO: 514 | AUUUU | NO: 305 |
| ETXS1047 | GmsUmsGmCmUmGmGfAmUfGfUfAm | SEQ ID | GUGCUGGAUGUACAGA | SEQ ID |
| | CmAmGmAmGmAmUmAmCm | NO: 515 | GAUAC | NO: 359 |
| ETXS1049 | UmsUmsCmCmAmAmAfGmUfGfCfCm | SEQ ID | UUCCAAAGUGCCUUAA | SEQ ID |
| | UmUmAmAmAmAmGmAmAm | NO: 516 | AAGAA | NO: 340 |
| ETXS1051 | GmsCmsUmAmUmGmUfAmAfAfCfUm | SEQ ID | GCUAUGUAAACUUGAA | SEQ ID |
| | UmGmAmAmUmUmUmCmCm | NO: 517 | UUUCC | NO: 322 |
| ETXS1053 | AmsCmsGmGmCmAmCfAmUfUfUfCm | SEQ ID | ACGGCACAUUUCCGUU | SEQ ID |
| | CmGmUmUmGmCmAmAmUm | NO: 518 | GCAAU | NO: 334 |
| ETXS1055 | CmsUmsAmUmGmUmAfAmAfCfUfUm | SEQ ID | CUAUGUAAACUUGAAU | SEQ ID |
| | GmAmAmUmUmUmCmCmUm | NO: 519 | UUCCU | NO: 327 |
| ETXS1057 | CmsAmsAmUmGmGmAfUmUfUfCfCm | SEQ ID | CAAUGGAUUUCCUAAU | SEQ ID |
| | UmAmAmUmAmAmUmUmAm | NO: 520 | AAUUA | NO: 316 |
| ETXS1059 | GmsGmsUmGmUmCmUfCmUfGfCfUm | SEQ ID | GGUGUCUCUGCUCUAA | SEQ ID |
| | CmUmAmAmGmUmAmAmAm | NO: 521 | GUAAA | NO: 323 |
| ETXS1061 | UmsCmsCmAmAmAmGfUmGfCfCfUm | SEQ ID | UCCAAAGUGCCUUAAA | SEQ ID |
| | UmAmAmAmAmGmAmAmAm | NO: 522 | AGAAA | NO: 326 |
| ETXS1063 | CmsAmsUmGmAmAmUfGmUfGfCfCm | SEQ ID | CAUGAAUGUGCCUUUU | SEQ ID |
| | UmUmUmUmAmAmUmUmAm | NO: 523 | AAUUA | NO: 324 |
| ETXS1065 | AmsAmsAmCmUmUmGfAmAfUfUfUm | SEQ ID | AAACUUGAAUUUCCUA | SEQ ID |
| | CmCmUmAmUmGmUmAmUm | NO: 524 | UGUAU | NO: 302 |
| ETXS1067 | UmsCmsCmUmGmAmCfUmUfUfUfCm | SEQ ID | UCCUGACUUUUCCAAA | SEQ ID |
| | CmAmAmAmGmUmGmCmCm | NO: 525 | GUGCC | NO: 369 |
| ETXS1069 | AmsUmsCmAmAmUmGfGmAfUfUfUm | SEQ ID | AUCAAUGGAUUUCCUA | SEQ ID |
| | CmCmUmAmAmUmAmAmUm | NO: 526 | AUAAU | NO: 319 |
| ETXS1071 | UmsGmsUmUmCmAmGfUmAfUfUfUm | SEQ ID | UGUUCAGUAUUUUGGA | SEQ ID |
| | UmGmGmAmGmGmUmGmUm | NO: 527 | GGUGU | NO: 362 |
| ETXS1073 | AmsUmsCmCmUmGmAfCmUfUfUfUm | SEQ ID | AUCCUGACUUUUCCAA | SEQ ID |
| | CmCmAmAmAmGmUmGmCm | NO: 528 | AGUGC | NO: 378 |
| ETXS1075 | AmsUmsGmGmAmUmUfUmCfCfUfAm | SEQ ID | AUGGAUUUCCUAAUAA | SEQ ID |
| | AmUmAmAmUmUmAmUmUm | NO: 529 | UUAUU | NO: 312 |
| ETXS1077 | AmsGmsCmAmUmGmAfAmUfGfUfGm | SEQ ID | AGCAUGAAUGUGCCUU | SEQ ID |
| | CmCmUmUmUmUmAmAmUm | NO: 530 | UUAAU | NO: 329 |
| ETXS1079 | UmsGmsUmCmUmCmUfGmCfUfCfUm | SEQ ID | UGUCUCUGCUCUAAGU | SEQ ID |
| | AmAmGmUmAmAmAmCmAm | NO: 531 | AAACA | NO: 342 |
| ETXS1081 | AmsUmsGmUmUmCmAfGmUfAfUfUm | SEQ ID | AUGUUCAGUAUUUUGG | SEQ ID |
| | UmUmGmGmAmGmGmUmGm | NO: 532 | AGGUG | NO: 393 |
| ETXS1083 | GmsAmsUmCmCmUmGfAmCfUfUfUm | SEQ ID | GAUCCUGACUUUUCCA | SEQ ID |
| | UmCmCmAmAmAmGmUmGm | NO: 533 | AAGUG | NO: 354 |
| ETXS1085 | AmsUmsGmCmUmAmUfGmUfAfAfAm | SEQ ID | AUGCUAUGUAAACUUG | SEQ ID |
| | CmUmUmGmAmAmUmUmUm | NO: 534 | AAUUU | NO: 308 |
| ETXS1087 | GmsCmsUmCmUmAmAfGmUfAfAfAm | SEQ ID | GCUCUAAGUAAACAAC | SEQ ID |
| | CmAmAmCmAmGmUmUmUm | NO: 535 | AGUUU | NO: 360 |
| ETXS1089 | GmsCmsUmGmGmAmUfGmUfAfCfAm | SEQ ID | GCUGGAUGUACAGAGA | SEQ ID |
| | GmAmGmAmUmAmCmCmCm | NO: 536 | UACCC | NO: 381 |
| ETXS1091 | UmsCmsUmCmUmGmCfUmCfUfAfAm | SEQ ID | UCUCUGCUCUAAGUAA | SEQ ID |
| | GmUmAmAmAmCmAmAmCm | NO: 537 | ACAAC | NO: 347 |
| ETXS1093 | UmsAmsUmGmUmAmAfAmCfUfUfGm | SEQ ID | UAUGUAAACUUGAAUU | SEQ ID |
| | AmAmUmUmUmCmCmUmAm | NO: 538 | UCCUA | NO: 303 |
| ETXS1095 | UmsAmsCmCmCmAmAfAmUfCfAfCm | SEQ ID | UACCCAAAUCACAGUG | SEQ ID |
| | AmGmUmGmGmAmCmAmUm | NO: 539 | GACAU | NO: 351 |
| ETXS1097 | UmsCmsCmUmCmAmGfAmGfGfUfUm | SEQ ID | UCCUCAGAGGUUUGAC | SEQ ID |
| | UmGmAmCmCmGmAmAmUm | NO: 540 | CGAAU | NO: 315 |
| ETXS1099 | AmsCmsUmUmGmAmAfUmUfUfCfCm | SEQ ID | ACUUGAAUUUCCUAUG | SEQ ID |
| | UmAmUmGmUmAmUmUmUm | NO: 541 | UAUUU | NO: 306 |
| ETXS1101 | AmsUmsGmAmAmUmGfUmGfCfCfUm | SEQ ID | AUGAAUGUGCCUUUUA | SEQ ID |
| | UmUmUmAmAmUmUmAmGm | NO: 542 | AUUAG | NO: 349 |
| ETXS1103 | GmsCmsGmUmCmUmCfUmCfCfUfCm | SEQ ID | GCGUCUCUCCUCACAA | SEQ ID |
| | AmCmAmAmGmGmUmGmGm | NO: 543 | GGUGG | NO: 370 |
| ETXS1105 | AmsUmsAmCmCmCmAfAmAfUfCfAm | SEQ ID | AUACCCAAAUCACAGU | SEQ ID |
| | CmAmGmUmGmGmAmCmAm | NO: 544 | GGACA | NO: 379 |
| ETXS1107 | UmsAmsAmAmCmUmUfGmAfAfUfUm | SEQ ID | UAAACUUGAAUUUCCU | SEQ ID |
| | UmCmCmUmAmUmGmUmAm | NO: 545 | AUGUA | NO: 310 |
| ETXS1109 | GmsUmsCmUmGmAmUfUmUfCfUfGm | SEQ ID | GUCUGAUUUCUGAAUG | SEQ ID |
| | AmAmUmGmUmAmAmAmGm | NO: 546 | UAAAG | NO: 333 |
| ETXS1111 | GmsGmsAmUmUmUmCfCmUfAfAfUm | SEQ ID | GGAUUUCCUAAUAAUU | SEQ ID |
| | AmAmUmUmAmUmUmGmGm | NO: 547 | AUUGG | NO: 371 |
| ETXS1113 | AmsUmsUmCmCmGmCfAmAfCfCfGm | SEQ ID | AUUCCGCAACCGGCAG | SEQ ID |
| | GmCmAmGmGmAmGmCmAm | NO: 548 | GAGCA | NO: 380 |
| ETXS1115 | GmsUmsCmUmCmUmGfCmUfCfUfAm | SEQ ID | GUCUCUGCUCUAAGUA | SEQ ID |
| | AmGmUmAmAmAmCmAmAm | NO: 549 | AACAA | NO: 353 |
| ETXS1117 | CmsUmsGmCmUmCmUfAmAfGfUfAm | SEQ ID | CUGCUCUAAGUAAACA | SEQ ID |
| | AmAmCmAmAmCmAmGmUm | NO: 550 | ACAGU | NO: 365 |
| ETXS1119 | UmsUmsUmUmCmCmAfAmAfGfUfGm | SEQ ID | UUUUCCAAAGUGCCUU | SEQ ID |
| | CmCmUmUmAmAmAmAmGm | NO: 551 | AAAAG | NO: 341 |
| ETXS1121 | UmsAmsUmGmUmUmCfAmGfUfAfUm | SEQ ID | UAUGUUCAGUAUUUUG | SEQ ID |
| | UmUmUmGmGmAmGmGmUm | NO: 552 | GAGGU | NO: 356 |
| ETXS1123 | AmsCmsAmGmUmGmGfAmCfAfUfCm | SEQ ID | ACAGUGGACAUCGGGA | SEQ ID |
| | GmGmGmAmCmAmCmCmGm | NO: 553 | CACCG | NO: 390 |
| ETXS1125 | AmsUmsUmUmCmCmUfAmAfUfAfAm | SEQ ID | AUUUCCUAAUAAUUAU | SEQ ID |
| | UmUmAmUmUmGmGmGmGm | NO: 554 | UGGGG | NO: 389 |
| ETXS1127 | AmsCmsCmCmAmAmAfUmCfAfCfAm | SEQ ID | ACCCAAAUCACAGUGG | SEQ ID |
| | GmUmGmGmAmCmAmUmCm | NO: 555 | ACAUC | NO: 388 |
| ETXS1129 | UmsUmsUmGmGmAmGfGmUfGfUfCm | SEQ ID | UUUGGAGGUGUCUCUG | SEQ ID |
| | UmCmUmGmCmUmCmUmAm | NO: 556 | CUCUA | NO: 346 |
| ETXS1131 | CmsCmsAmAmAmUmCfAmCfAfGfUm | SEQ ID | CCAAAUCACAGUGGAC | SEQ ID |
| | GmGmAmCmAmUmCmGmGm | NO: 557 | AUCGG | NO: 364 |
| ETXS1133 | UmsUmsUmCmCmAmAfAmGfUfGfCm | SEQ ID | UUUCCAAAGUGCCUUA | SEQ ID |
| | CmUmUmAmAmAmAmGmAm | NO: 558 | AAAGA | NO: 367 |
| ETXS1135 | GmsAmsUmUmUmCmCfUmAfAfUfAm | SEQ ID | GAUUUCCUAAUAAUUA | SEQ ID |
| | AmUmUmAmUmUmGmGmGm | NO: 559 | UUGGG | NO: 335 |
| ETXS1137 | UmsAmsUmAmCmCmCfAmAfAfUfCm | SEQ ID | UAUACCCAAAUCACAG | SEQ ID |
| | AmCmAmGmUmGmGmAmCm | NO: 560 | UGGAC | NO: 373 |
| ETXS1139 | GmsGmsUmUmUmGmAfAmCfUfCfAm | SEQ ID | GGUUUGAACUCACUCA | SEQ ID |
| | CmUmCmAmCmCmUmAmCm | NO: 561 | CCUAC | NO: 345 |
| ETXS1141 | GmsGmsAmGmGmUmGfUmCfUfCfUm | SEQ ID | GGAGGUGUCUCUGCUC | SEQ ID |
| | GmCmUmCmUmAmAmGmUm | NO: 562 | UAAGU | NO: 332 |
| ETXS1143 | UmsGmsCmGmUmCmUfCmUfCfCfUm | SEQ ID | UGCGUCUCUCCUCACA | SEQ ID |
| | CmAmCmAmAmGmGmUmGm | NO: 563 | AGGUG | NO: 401 |
| ETXS1145 | AmsGmsGmAmGmAmAfGmAfUfGfAm | SEQ ID | AGGAGAAGAUGAUGAC | SEQ ID |
| | UmGmAmCmAmUmUmUmUm | NO: 564 | AUUUU | NO: 331 |
| ETXS1147 | UmsGmsGmAmGmGmUfGmUfCfUfCm | SEQ ID | UGGAGGUGUCUCUGCU | SEQ ID |
| | UmGmCmUmCmUmAmAmGm | NO: 565 | CUAAG | NO: 366 |
| ETXS1149 | UmsUmsAmUmUmGmGfGmGfCfUfGm | SEQ ID | UUAUUGGGGCUGGGGA | SEQ ID |
| | GmGmGmAmGmGmAmGmAm | NO: 566 | GGAGA | NO: 376 |
| ETXS1151 | CmsCmsUmGmAmCmUfUmUfUfCfCm | SEQ ID | CCUGACUUUUCCAAAG | SEQ ID |
| | AmAmAmGmUmGmCmCmUm | NO: 567 | UGCCU | NO: 343 |
| ETXS1153 | GmsGmsCmAmCmAmUfUmUfCfCfGm | SEQ ID | GGCACAUUUCCGUUGC | SEQ ID |
| | UmUmGmCmAmAmUmGmGm | NO: 568 | AAUGG | NO: 372 |
| ETXS1155 | UmsGmsCmUmCmUmAfAmGfUfAfAm | SEQ ID | UGCUCUAAGUAAACAA | SEQ ID |
| | AmCmAmAmCmAmGmUmUm | NO: 569 | CAGUU | NO: 321 |
| ETXS1157 | UmsUmsGmGmAmGmGfUmGfUfCfUm | SEQ ID | UUGGAGGUGUCUCUGC | SEQ ID |
| | CmUmGmCmUmCmUmAmAm | NO: 570 | UCUAA | NO: 314 |
| ETXS1159 | UmsGmsCmUmAmUmGfUmAfAfAfCm | SEQ ID | UGCUAUGUAAACUUGA | SEQ ID |
| | UmUmGmAmAmUmUmUmCm | NO: 571 | AUUUC | NO: 318 |
| ETXS1161 | UmsGmsGmAmUmUmUfCmCfUfAfAm | SEQ ID | UGGAUUUCCUAAUAAU | SEQ ID |
| | UmAmAmUmUmAmUmUmGm | NO: 572 | UAUUG | NO: 357 |
| ETXS1163 | AmsUmsUmAmUmUmGfGmGfGfCfUm | SEQ ID | AUUAUUGGGGCUGGGG | SEQ ID |
| | GmGmGmGmAmGmGmAmGm | NO: 573 | AGGAG | NO: 396 |
| ETXS1165 | CmsUmsUmUmUmCmCfAmAfAfGfUm | SEQ ID | CUUUUCCAAAGUGCCU | SEQ ID |
| | GmCmCmUmUmAmAmAmAm | NO: 574 | UAAAA | NO: 317 |
| ETXS1167 | UmsAmsUmUmGmGmGfGmCfUfGfGm | SEQ ID | UAUUGGGGCUGGGGAG | SEQ ID |
| | GmGmAmGmGmAmGmAmAm | NO: 575 | GAGAA | NO: 386 |
| ETXS1169 | GmsAmsCmAmUmCmGfGmGfAfCfAm | SEQ ID | GACAUCGGGACACCGA | SEQ ID |
| | CmCmGmAmGmCmUmAmGm | NO: 576 | GCUAG | NO: 394 |
| ETXS1171 | UmsUmsCmAmGmUmAfUmUfUfUfGm | SEQ ID | UUCAGUAUUUUGGAGG | SEQ ID |
| | GmAmGmGmUmGmUmCmUm | NO: 577 | UGUCU | NO: 336 |
| ETXS1173 | GmsAmsGmGmUmGmUfCmUfCfUfGm | SEQ ID | GAGGUGUCUCUGCUCU | SEQ ID |
| | CmUmCmUmAmAmGmUmAm | NO: 578 | AAGUA | NO: 358 |
| ETXS1175 | UmsGmsGmUmUmUmGfAmAfCfUfCm | SEQ ID | UGGUUUGAACUCACUC | SEQ ID |
| | AmCmUmCmAmCmCmUmAm | NO: 579 | ACCUA | NO: 339 |
| ETXS1177 | UmsCmsUmGmAmUmUfUmCfUfGfAm | SEQ ID | UCUGAUUUCUGAAUGU | SEQ ID |
| | AmUmGmUmAmAmAmGmUm | NO: 580 | AAAGU | NO: 309 |
| ETXS1179 | UmsGmsUmAmAmAmCfUmUfGfAfAm | SEQ ID | UGUAAACUUGAAUUUC | SEQ ID |
| | UmUmUmCmCmUmAmUmGm | NO: 581 | CUAUG | NO: 304 |
| ETXS1181 | GmsUmsGmUmCmUmCfUmGfCfUfCm | SEQ ID | GUGUCUCUGCUCUAAG | SEQ ID |
| | UmAmAmGmUmAmAmAmCm | NO: 582 | UAAAC | NO: 330 |
| ETXS1183 | CmsUmsGmCmGmUmCfUmCfUfCfCm | SEQ ID | CUGCGUCUCUCCUCAC | SEQ ID |
| | UmCmAmCmAmAmGmGmUm | NO: 583 | AAGGU | NO: 382 |
| ETXS1185 | UmsUmsAmUmGmUmUfCmAfGfUfAm | SEQ ID | UUAUGUUCAGUAUUUU | SEQ ID |
| | UmUmUmUmGmGmAmGmGm | NO: 584 | GGAGG | NO: 387 |
| ETXS1187 | CmsAmsCmAmGmUmGfGmAfCfAfUm | SEQ ID | CACAGUGGACAUCGGG | SEQ ID |
| | CmGmGmGmAmCmAmCmCm | NO: 585 | ACACC | NO: 352 |
| ETXS1189 | UmsCmsUmGmCmUmCfUmAfAfGfUm | SEQ ID | UCUGCUCUAAGUAAAC | SEQ ID |
| | AmAmAmCmAmAmCmAmGm | NO: 586 | AACAG | NO: 361 |
| ETXS1191 | CmsGmsGmCmAmCmAfUmUfUfCfCm | SEQ ID | CGGCACAUUUCCGUUG | SEQ ID |
| | GmUmUmGmCmAmAmUmGm | NO: 587 | CAAUG | NO: 350 |
| ETXS1193 | UmsCmsAmGmUmAmUfUmUfUfGfGm | SEQ ID | UCAGUAUUUUGGAGGU | SEQ ID |
| | AmGmGmUmGmUmCmUmCm | NO: 588 | GUCUC | NO: 374 |
| ETXS1195 | GmsCmsAmCmAmUmUfUmCfCfGfUm | SEQ ID | GCACAUUUCCGUUGCA | SEQ ID |
| | UmGmCmAmAmUmGmGmAm | NO: 589 | AUGGA | NO: 348 |
| ETXS1197 | CmsAmsUmGmCmUmAfUmGfUfAfAm | SEQ ID | CAUGCUAUGUAAACUU | SEQ ID |
| | AmCmUmUmGmAmAmUmUm | NO: 590 | GAAUU | NO: 313 |
| ETXS1199 | AmsUmsCmCmUmCmAfGmAfGfGfUm | SEQ ID | AUCCUCAGAGGUUUGA | SEQ ID |
| | UmUmGmAmCmCmGmAmAm | NO: 591 | CCGAA | NO: 338 |
| ETXS1201 | UmsCmsAmCmAmGmUfGmGfAfCfAm | SEQ ID | UCACAGUGGACAUCGG | SEQ ID |
| | UmCmGmGmGmAmCmAmCm | NO: 592 | GACAC | NO: 400 |
| ETXS1203 | CmsUmsUmUmCmAmAfGmAfAfGfCm | SEQ ID | CUUUCAAGAAGCCUUG | SEQ ID |
| | CmUmUmGmAmAmGmGmAm | NO: 593 | AAGGA | NO: 375 |
| ETXS1205 | AmsGmsGmUmGmUmCfUmCfUfGfCm | SEQ ID | AGGUGUCUCUGCUCUA | SEQ ID |
| | UmCmUmAmAmGmUmAmAm | NO: 594 | AGUAA | NO: 325 |
| ETXS1207 | UmsUmsUmUmGmGmAfGmGfUfGfUm | SEQ ID | UUUUGGAGGUGUCUCU | SEQ ID |
| | CmUmCmUmGmCmUmCmUm | NO: 595 | GCUCU | NO: 363 |
| ETXS1209 | GmsCmsAmUmGmAmAfUmGfUfGfCm | SEQ ID | GCAUGAAUGUGCCUUU | SEQ ID |
| | CmUmUmUmUmAmAmUmUm | NO: 596 | UAAUU | NO: 355 |
| ETXS1211 | AmsCmsAmUmCmGmGfGmAfCfAfCm | SEQ ID | ACAUCGGGACACCGAG | SEQ ID |
| | CmGmAmGmCmUmAmGmCm | NO: 597 | CUAGC | NO: 377 |
| ETXS1213 | AmsCmsUmGmCmGmUfCmUfCfUfCm | SEQ ID | ACUGCGUCUCUCCUCA | SEQ ID |
| | CmUmCmAmCmAmAmGmGm | NO: 598 | CAAGG | NO: 398 |
| ETXS1215 | GmsUmsAmUmAmCmCfCmAfAfAfUm | SEQ ID | GUAUACCCAAAUCACA | SEQ ID |
| | CmAmCmAmGmUmGmGmAm | NO: 599 | GUGGA | NO: 391 |
| ETXS1217 | UmsGmsCmUmGmGmAfUmGfUfAfCm | SEQ ID | UGCUGGAUGUACAGAG | SEQ ID |
| | AmGmAmGmAmUmAmCmCm | NO: 600 | AUACC | NO: 368 |
| ETXS1219 | AmsUmsGmUmAmAmAfCmUfUfGfAm | SEQ ID | AUGUAAACUUGAAUUU | SEQ ID |
| | AmUmUmUmCmCmUmAmUm | NO: 601 | CCUAU | NO: 307 |
| ETXS1221 | GmsGmsGmGmCmUmGfGmGfGfAfGm | SEQ ID | GGGGCUGGGGAGGAGA | SEQ ID |
| | GmAmGmAmAmGmAmUmGm | NO: 602 | AGAUG | NO: 397 |
| ETXS1223 | CmsUmsCmUmGmCmUfCmUfAfAfGm | SEQ ID | CUCUGCUCUAAGUAAA | SEQ ID |
| | UmAmAmAmCmAmAmCmAm | NO: 603 | CAACA | NO: 384 |
| ETXS1225 | UmsGmsGmGmGmCmUfGmGfGfGfAm | SEQ ID | UGGGGCUGGGGAGGAG | SEQ ID |
| | GmGmAmGmAmAmGmAmUm | NO: 604 | AAGAU | NO: 392 |
| ETXS1227 | AmsAmsUmCmAmCmAfGmUfGfGfAm | SEQ ID | AAUCACAGUGGACAUC | SEQ ID |
| | CmAmUmCmGmGmGmAmCm | NO: 605 | GGGAC | NO: 383 |
| ETXS1229 | AmsGmsUmGmGmAmCfAmUfCfGfGm | SEQ ID | AGUGGACAUCGGGACA | SEQ ID |
| | GmAmCmAmCmCmGmAmGm | NO: 606 | CCGAG | NO: 395 |
| ETXS1231 | AmsAmsUmAmAmUmUfAmUfUfGfGm | SEQ ID | AAUAAUUAUUGGGGCU | SEQ ID |
| | GmGmCmUmGmGmGmGmAm | NO: 607 | GGGGA | NO: 399 |
| ETXS1233 | CmsAmsGmUmAmUmUfUmUfGfGfAm | SEQ ID | CAGUAUUUUGGAGGUG | SEQ ID |
| | GmGmUmGmUmCmUmCmUm | NO: 608 | UCUCU | NO: 328 |
| ETXS1235 | AmsUmsUmUmUmGmGfAmGfGfUfGm | SEQ ID | AUUUUGGAGGUGUCUC | SEQ ID |
| | UmCmUmCmUmGmCmUmCm | NO: 609 | UGCUC | NO: 344 |
| ETXS2399 | iaiaAmsAmsAmCmUmUmGfAmAfUfUf | SEQ ID | AAACUUGAAUUUCCUA | SEQ ID |
| | UfCmCmUmAmUmGmUmAmUm | NO: 610 | UGUAU | NO: 302 |
| ETXS2401 | iaiaAmsAmsAmCmUmUmGmAmAfUfUf | SEQ ID | AAACUUGAAUUUCCUA | SEQ ID |
| | UmCmCmUmAmUmGmUmAmUm | NO: 611 | UGUAU | NO: 302 |
| ETXS2405 | iaiaCmsUmsUmGmAmAmUfUmUfCfCf | SEQ ID | CUUGAAUUUCCUAUGU | SEQ ID |
| | UfAmUmGmUmAmUmUmUmUm | NO: 612 | AUUUU | NO: 305 |
| ETXS2407 | iaiaCmsUmsUmGmAmAmUmUmUfCfCf | SEQ ID | CUUGAAUUUCCUAUGU | SEQ ID |
| | UmAmUmGmUmAmUmUmUmUm | NO: 613 | AUUUU | NO: 305 |
| ETXS2423 | iaiaCmsUmsUmUmUmCmCfAmAfAfGf | SEQ ID | CUUUUCCAAAGUGCCU | SEQ ID |
| | UfGmCmCmUmUmAmAmAmAm | NO: 614 | UAAAA | NO: 317 |
| ETXS2425 | iaiaCmsUmsUmUmUmCmCmAmAfAfGf | SEQ ID | CUUUUCCAAAGUGCCU | SEQ ID |
| | UmGmCmCmUmUmAmAmAmAm | NO: 615 | UAAAA | NO: 317 |
| ETXS2429 | iaiaCmsAmsGmUmAmUmUfUmUfGfGf | SEQ ID | CAGUAUUUUGGAGGUG | SEQ ID |
| | AfGmGmUmGmUmCmUmCmUm | NO: 616 | UCUCU | NO: 328 |
| ETXS2431 | iaiaCmsAmsGmUmAmUmUmUmUfGfGf | SEQ ID | CAGUAUUUUGGAGGUG | SEQ ID |
| | AmGmGmUmGmUmCmUmCmUm | NO: 617 | UCUCU | NO: 328 |

[0197] As used herein, and in particular in Tables 3 and 4, the following abbreviations are used for modified nucleosides:

[0198] Am stands for 2′-O-methyl-adenosine, Cm stands for 2′-O-methyl-cytidine, Gm stands for 2′-O-methyl-guanosine, Urn stands for 2′-O-methyl-uridine, Af stands for 2′-Fluoro-adenosine, Cf stands for 2′-Fluoro-cytidine, Gf stands for 2′-Fluoro-guanosine and Uf stands for 2′-Fluoro-uridine.

[0199] Furthermore, the letter “s” is used as abbreviation for a phosphorothioate linkage between two consecutive (modified) nucleosides. For example, the abbreviation “AmsAm” is used for two consecutive 2′-O-methyl-adenosine nucleosides that are linked via a 3′-5′ phosphorothioate linkage. No abbreviation is used for nucleosides that are linked via a standard 3′-5′ phosphodiester linkage. For example, the abbreviation “AmAm” is used for two consecutive 2′-O-methyl-adenosine nucleosides that are linked via a 3′-5′ phosphodiester linkage.

[0200] In certain embodiments, the nucleic acid comprises a first strand that comprises, consists of, or consists essentially of a (modified) nucleoside sequence differing by 0 or 1 nucleosides from any one of SEQ ID NOs: 62-81 or SEQ ID NOs: 402-513; and a second strand that comprises, consists of, or consists essentially of a (modified) nucleoside sequence differing by 0 or 1 nucleosides from any one of SEQ ID NOs: 82-101 or SEQ ID NOs: 514-621.

[0201] Preferred combinations of complementary modified antisense (first) and sense (second) strands are listed below in Table 5:

TABLE 5

| Duplex ID | First (Antisense) strand ID | Second (Sense) strand ID |
|---|---|---|
| ETXM619 | ETXS1238 | ETXS1237 |
| ETXM620 | ETXS1240 | ETXS1239 |
| ETXM621 | ETXS1242 | ETXS1241 |
| ETXM622 | ETXS1244 | ETXS1243 |
| ETXM623 | ETXS1246 | ETXS1245 |
| ETXM624 | ETXS1248 | ETXS1247 |
| ETXM625 | ETXS1250 | ETXS1249 |
| ETXM626 | ETXS1252 | ETXS1251 |
| ETXM627 | ETXS1254 | ETXS1253 |
| ETXM628 | ETXS1256 | ETXS1255 |
| ETXM629 | ETXS1258 | ETXS1257 |
| ETXM630 | ETXS1260 | ETXS1259 |
| ETXM631 | ETXS1262 | ETXS1261 |
| ETXM632 | ETXS1264 | ETXS1263 |
| ETXM633 | ETXS1266 | ETXS1265 |
| ETXM634 | ETXS1268 | ETXS1267 |
| ETXM635 | ETXS1270 | ETXS1269 |
| ETXM636 | ETXS1272 | ETXS1271 |
| ETXM637 | ETXS1274 | ETXS1273 |
| ETXM638 | ETXS1276 | ETXS1275 |
| ETXM519 | ETXS1038 | ETXS1037 |
| ETXM520 | ETXS1040 | ETXS1039 |
| ETXM521 | ETXS1042 | ETXS1041 |
| ETXM522 | ETXS1044 | ETXS1043 |
| ETXM523 | ETXS1046 | ETXS1045 |
| ETXM524 | ETXS1048 | ETXS1047 |
| ETXM525 | ETXS1050 | ETXS1049 |
| ETXM526 | ETXS1052 | ETXS1051 |
| ETXM527 | ETXS1054 | ETXS1053 |
| ETXM528 | ETXS1056 | ETXS1055 |
| ETXM529 | ETXS1058 | ETXS1057 |
| ETXM530 | ETXS1060 | ETXS1059 |
| ETXM531 | ETXS1062 | ETXS1061 |
| ETXM532 | ETXS1064 | ETXS1063 |
| ETXM533 | ETXS1066 | ETXS1065 |
| ETXM534 | ETXS1068 | ETXS1067 |
| ETXM535 | ETXS1070 | ETXS1069 |
| ETXM536 | ETXS1072 | ETXS1071 |
| ETXM537 | ETXS1074 | ETXS1073 |
| ETXM538 | ETXS1076 | ETXS1075 |
| ETXM539 | ETXS1078 | ETXS1077 |
| ETXM540 | ETXS1080 | ETXS1079 |
| ETXM541 | ETXS1082 | ETXS1081 |
| ETXM542 | ETXS1084 | ETXS1083 |
| ETXM543 | ETXS1086 | ETXS1085 |
| ETXM544 | ETXS1088 | ETXS1087 |
| ETXM545 | ETXS1090 | ETXS1089 |
| ETXM546 | ETXS1092 | ETXS1091 |
| ETXM547 | ETXS1094 | ETXS1093 |
| ETXM548 | ETXS1096 | ETXS1095 |
| ETXM549 | ETXS1098 | ETXS1097 |
| ETXM550 | ETXS1100 | ETXS1099 |
| ETXM551 | ETXS1102 | ETXS1101 |
| ETXM552 | ETXS1104 | ETXS1103 |
| ETXM553 | ETXS1106 | ETXS1105 |
| ETXM554 | ETXS1108 | ETXS1107 |
| ETXM555 | ETXS1110 | ETXS1109 |
| ETXM556 | ETXS1112 | ETXS1111 |
| ETXM557 | ETXS1114 | ETXS1113 |
| ETXM558 | ETXS1116 | ETXS1115 |
| ETXM559 | ETXS1118 | ETXS1117 |
| ETXM560 | ETXS1120 | ETXS1119 |
| ETXM561 | ETXS1122 | ETXS1121 |
| ETXM562 | ETXS1124 | ETXS1123 |
| ETXM563 | ETXS1126 | ETXS1125 |
| ETXM564 | ETXS1128 | ETXS1127 |
| ETXM565 | ETXS1130 | ETXS1129 |
| ETXM566 | ETXS1132 | ETXS1131 |
| ETXM567 | ETXS1134 | ETXS1133 |
| ETXM568 | ETXS1136 | ETXS1135 |
| ETXM569 | ETXS1138 | ETXS1137 |
| ETXM570 | ETXS1140 | ETXS1139 |
| ETXM571 | ETXS1142 | ETXS1141 |
| ETXM572 | ETXS1144 | ETXS1143 |
| ETXM573 | ETXS1146 | ETXS1145 |
| ETXM574 | ETXS1148 | ETXS1147 |
| ETXM575 | ETXS1150 | ETXS1149 |
| ETXM576 | ETXS1152 | ETXS1151 |
| ETXM577 | ETXS1154 | ETXS1153 |
| ETXM578 | ETXS1156 | ETXS1155 |
| ETXM579 | ETXS1158 | ETXS1157 |
| ETXM580 | ETXS1160 | ETXS1159 |
| ETXM581 | ETXS1162 | ETXS1161 |
| ETXM582 | ETXS1164 | ETXS1163 |
| ETXM583 | ETXS1166 | ETXS1165 |
| ETXM584 | ETXS1168 | ETXS1167 |
| ETXM585 | ETXS1170 | ETXS1169 |
| ETXM586 | ETXS1172 | ETXS1171 |
| ETXM587 | ETXS1174 | ETXS1173 |
| ETXM588 | ETXS1176 | ETXS1175 |
| ETXM589 | ETXS1178 | ETXS1177 |
| ETXM590 | ETXS1180 | ETXS1179 |
| ETXM591 | ETXS1182 | ETXS1181 |
| ETXM592 | ETXS1184 | ETXS1183 |
| ETXM593 | ETXS1186 | ETXS1185 |
| ETXM594 | ETXS1188 | ETXS1187 |
| ETXM595 | ETXS1190 | ETXS1189 |
| ETXM596 | ETXS1192 | ETXS1191 |
| ETXM597 | ETXS1194 | ETXS1193 |
| ETXM598 | ETXS1196 | ETXS1195 |
| ETXM599 | ETXS1198 | ETXS1197 |
| ETXM600 | ETXS1200 | ETXS1199 |
| ETXM601 | ETXS1202 | ETXS1201 |
| ETXM602 | ETXS1204 | ETXS1203 |
| ETXM603 | ETXS1206 | ETXS1205 |
| ETXM604 | ETXS1208 | ETXS1207 |
| ETXM605 | ETXS1210 | ETXS1209 |
| ETXM606 | ETXS1212 | ETXS1211 |
| ETXM607 | ETXS1214 | ETXS1213 |
| ETXM608 | ETXS1216 | ETXS1215 |
| ETXM609 | ETXS1218 | ETXS1217 |
| ETXM610 | ETXS1220 | ETXS1219 |
| ETXM611 | ETXS1222 | ETXS1221 |
| ETXM612 | ETXS1224 | ETXS1223 |
| ETXM613 | ETXS1226 | ETXS1225 |
| ETXM614 | ETXS1228 | ETXS1227 |
| ETXM615 | ETXS1230 | ETXS1229 |
| ETXM616 | ETXS1232 | ETXS1231 |
| ETXM617 | ETXS1234 | ETXS1233 |
| ETXM618 | ETXS1236 | ETXS1235 |
| ETXM1200 | ETXS2400 | ETXS2399 |
| ETXM1201 | ETXS2402 | ETXS2401 |
| ETXM1203 | ETXS2406 | ETXS2405 |
| ETXM1204 | ETXS2408 | ETXS2407 |
| ETXM1212 | ETXS2424 | ETXS2423 |
| ETXM1213 | ETXS2426 | ETXS2425 |
| ETXM1215 | ETXS2430 | ETXS2429 |
| ETXM1216 | ETXS2432 | ETXS2431 |
| ETXM1217 | ETXS2434 | ETXS2401 |
| ETXM1218 | ETXS2436 | ETXS2407 |
| ETXM1219 | ETXS2438 | ETXS2425 |
| ETXM1220 | ETXS2440 | ETXS2431 |

[0202] In a particularly preferred embodiment, the invention relates to a nucleic acid comprising first and second strands that comprise, consist of, or consist essentially of a nucleoside sequence differing by 0 or 1 nucleosides from any one of the following first and second sequences:

| Modified first strand | Modified second strand |
|---|---|
| SEQ ID NO: 502 (ETXS2400) | SEQ ID NO: 610 (ETXS2399) |
| SEQ ID NO: 503 (ETXS2402) | SEQ ID NO: 611 (ETXS2401) |
| SEQ ID NO: 504 (ETXS2406) | SEQ ID NO: 612 (ETXS2405) |
| SEQ ID NO: 505 (ETXS2408) | SEQ ID NO: 613 (ETXS2407) |
| SEQ ID NO: 506 (ETXS2424) | SEQ ID NO: 614 (ETXS2423) |
| SEQ ID NO: 507 (ETXS2426) | SEQ ID NO: 615 (ETXS2425) |
| SEQ ID NO: 508 (ETXS2430) | SEQ ID NO: 616 (ETXS2429) |
| SEQ ID NO: 509 (ETXS2432) | SEQ ID NO: 617 (ETXS2431) |
| SEQ ID NO: 510 (ETXS2434) | SEQ ID NO: 611 (ETXS2401) |
| SEQ ID NO: 511 (ETXS2436) | SEQ ID NO: 613 (ETXS2407) |
| SEQ ID NO: 512 (ETXS2438) | SEQ ID NO: 615 (ETXS2425) |
| SEQ ID NO: 513 (ETXS2440) | SEQ ID NO: 617 (ETXS2431) |

[0203] In case of ambiguity between the sequences in this specification and the sequences in the attached sequence listing, the sequences provided herein are considered to be the correct sequences.

### Abasic Nucleotides

[0204] In certain embodiments, there are 1, e.g. 2, e.g. 3, e.g. 4 or more abasic nucleosides present in nucleic acids according to the invention. Abasic nucleosides are modified nucleosides because they lack the base normally seen at position 1 of the sugar moiety. Typically, there will be a hydrogen at position 1 of the sugar moiety of the abasic nucleosides present in a nucleic acid according to the present invention.

[0205] The abasic nucleosides are in the terminal region of the second strand, preferably located within the terminal 5 nucleosides of the end of the strand. The terminal region may be the terminal 5 nucleosides, which includes abasic nucleosides.

[0206] The second strand may comprise, as preferred features (which are all specifically contemplated in combination unless mutually exclusive):
[0207] 2, or more than 2, abasic nucleosides in a terminal region of the second strand; and/or
[0208] 2, or more than 2, abasic nucleosides in either the 5′ or 3′ terminal region of the second strand; and/or
[0209] 2, or more than 2, abasic nucleosides in either the 5′ or 3′ terminal region of the second strand, wherein the abasic nucleosides are present in an overhang as herein described; and/or
[0210] 2, or more than 2, consecutive abasic nucleosides in a terminal region of the second strand, wherein preferably one such abasic nucleosides is a terminal nucleosides; and/or
[0211] 2, or more than 2, consecutive abasic nucleosides in either the 5′ or 3′ terminal region of the second strand, wherein preferably one such abasic nucleosides is a terminal nucleosides in either the 5′ or 3′ terminal region of the second strand; and/or
[0212] a reversed internucleoside linkage connects at least one abasic nucleoside to an adjacent basic nucleoside in a terminal region of the second strand; and/or
[0213] a reversed internucleoside linkage connects at least one abasic nucleoside to an adjacent basic nucleoside in either the 5′ or 3′ terminal region of the second strand; and/or
[0214] an abasic nucleoside as the penultimate nucleoside which is connected via the reversed linkage to the nucleoside which is not the terminal nucleoside (called the antepenultimate nucleoside herein); and/or
[0215] abasic nucleosides as the 2 terminal nucleosides connected via a 5′-3′ linkage when reading the strand in the direction towards the terminus comprising the terminal nucleosides;
[0216] abasic nucleosides as the 2 terminal nucleosides connected via a 3′-5′ linkage when reading the strand in the direction towards the terminus comprising the terminal nucleosides;
[0217] abasic nucleosides as the terminal 2 positions, wherein the penultimate nucleoside is connected via the reversed linkage to the antepenultimate nucleoside, and wherein the reversed linkage is a 5-5′ reversed linkage or a 3′-3′ reversed linkage;
[0218] abasic nucleosides as the terminal 2 positions, wherein the penultimate nucleoside is connected via the reversed linkage to the antepenultimate nucleoside, and wherein either
[0219] (1) the reversed linkage is a 5-5′ reversed linkage and the linkage between the terminal and penultimate abasic nucleosides is 3′5′ when reading towards the terminus comprising the terminal and penultimate abasic nucleosides; or
[0220] (2) the reversed linkage is a 3-3′ reversed linkage and the linkage between the terminal and penultimate abasic nucleosides is 5′3′ when reading towards the terminus comprising the terminal and penultimate abasic nucleosides.

[0221] Preferably there is an abasic nucleoside at the terminus of the second strand.

[0222] Preferably there are 2 or at least 2 abasic nucleosides in the terminal region of the second strand, preferably at the terminal and penultimate positions.

[0223] Preferably 2 or more abasic nucleosides are consecutive, for example all abasic nucleosides may be consecutive. For example, the terminal 1 or terminal 2 or terminal 3 or terminal 4 nucleotides may be abasic nucleosides.

[0224] An abasic nucleoside may also be linked to an adjacent nucleoside through a 5′-3′ phosphodiester linkage or reversed linkage unless there is only 1 abasic nucleoside at the terminus, in which case it will have a reversed linkage to the adjacent nucleoside.

[0225] A reversed linkage (which may also be referred to as an inverted linkage, which is also seen in the art), comprises either a 5′-5′, a 3′-3′, a 3′-2′ or a 2′-3′ phosphodiester linkage between the adjacent sugar moieties of the nucleosides.

[0226] Abasic nucleosides which are not terminal will have 2 phosphodiester bonds, one with each adjacent nucleoside, and these may be a reversed linkage or may be a 5′-3 phosphodiester bond or may be one of each.

[0227] A preferred embodiment comprises 2 abasic nucleosides at the terminal and penultimate positions of the second strand, and wherein the reversed internucleoside linkage is located between the penultimate (abasic) nucleoside and the antepenultimate nucleoside.

[0228] Preferably there are 2 abasic nucleosides at the terminal and penultimate positions of the second strand and the penultimate nucleoside is linked to the antepenultimate nucleoside through a reversed internucleoside linkage and is linked to the terminal nucleoside through a 5′-3′ or 3′-5′ phosphodiester linkage (reading in the direction of the terminus of the molecule).

[0229] Different preferred features are as follows:

[0230] The reversed internucleoside linkage is a 3′-3′ reversed linkage. The reversed internucleoside linkage is at a terminal region which is distal to the 5′ terminal phosphate of the second strand.

[0231] The reversed internucleoside linkage is a 5′-5′ reversed linkage. The reversed internucleoside linkage is at a terminal region which is distal to the 3′ terminal hydroxide of the second strand.

[0232] In certain embodiments, the second strand comprises 2 consecutive abasic nucleosides in the 5′ terminal region of the second strand, wherein one such abasic nucleoside is a terminal nucleoside at the 5′ terminal region of the second strand and the other abasic nucleoside is a penultimate nucleoside at the 5′ terminal region of the second strand, wherein: (a) said penultimate abasic nucleoside is connected to an adjacent first basic nucleoside in an adjacent 5′ near terminal region through a reversed internucleoside linkage; and (b) the reversed linkage is a 5-5′ reversed linkage; and (c) the linkage between the terminal and penultimate abasic nucleosides is 3′-5′ when reading towards the terminus comprising the terminal and penultimate abasic nucleosides. More typically, (i) the first strand and the second strand each has a length of 19 or 23 nucleosides; (ii) two phosphorothioate internucleoside linkages are respectively between three consecutive positions in said 5′ near terminal region of the second strand, wherein a first phosphorothioate internucleoside linkage is present between said adjacent first basic nucleoside of (a) and an adjacent second basic nucleoside in said 5′ near terminal region of the second strand, and a second phosphorothioate internucleoside linkage is present between said adjacent second basic nucleoside and an adjacent third basic nucleoside in said 5′ near terminal region of the second strand; (iii) two phosphorothioate internucleoside linkages are respectively between three consecutive positions in both 5′ and 3′ terminal regions of the first strand, whereby a terminal nucleoside respectively at each of the 5′ and 3′ terminal regions of said first strand is each attached to a respective 5′ and 3′ adjacent penultimate nucleoside by a phosphorothioate internucleoside linkage, and each first 5′ and 3′ penultimate nucleoside is attached to a respective 5′ and 3′ adjacent antepenultimate nucleoside by a phosphorothioate internucleoside linkage; and (iv) the second strand of the nucleic acid is conjugated directly or indirectly to one or more ligand moieties at the 3′ terminal region of the second strand.

[0233] Alternatively the second strand comprises 2 consecutive abasic nucleosides preferably in an overhang in the 3′ terminal region of the second strand, wherein one such abasic nucleoside is a terminal nucleoside at the 3′ terminal region of the second strand and the other abasic nucleoside is a penultimate nucleoside at the 3′ terminal region of the second strand, wherein: (a) said penultimate abasic nucleoside is connected to an adjacent first basic nucleoside in an adjacent 3′ near terminal region through a reversed internucleoside linkage; and (b) the reversed linkage is a 3-3′ reversed linkage; and (c) the linkage between the terminal and penultimate abasic nucleosides is 5′-3′ when reading towards the terminus comprising the terminal and penultimate abasic nucleosides. More typically, (i) the first strand and the second strand each has a length of 19 or 23 nucleosides; (ii) two phosphorothioate internucleoside linkages are respectively between three consecutive positions in said 3′ near terminal region of the second strand, wherein a first phosphorothioate internucleoside linkage is present between said adjacent first basic nucleoside of (a) and an adjacent second basic nucleoside in said 3′ near terminal region of the second strand, and a second phosphorothioate internucleoside linkage is present between said adjacent second basic nucleoside and an adjacent third basic nucleoside in said 3′ near terminal region of the second strand; (iii) two phosphorothioate internucleoside linkages are respectively between three consecutive positions in both 5′ and 3′ terminal regions of the first strand, whereby a terminal nucleoside respectively at each of the 5′ and 3′ terminal regions of said first strand is each attached to a respective 5′ and 3′ adjacent penultimate nucleoside by a phosphorothioate internucleoside linkage, and each first 5′ and 3′ penultimate nucleoside is attached to a respective 5′ and 3′ adjacent antepenultimate nucleoside by a phosphorothioate internucleoside linkage; and (iv) the second strand of the nucleic acid is conjugated directly or indirectly to one or more ligand moieties at the 5′ terminal region of the second strand.

[0234] Examples of the structures are as follows (where the specific RNA nucleosides shown are not limiting and could be any RNA nucleoside):
[0235] A A 3′-3′ reversed bond (and also showing the 5′-3 direction of the last phosphodiester bond between the two abasic molecules reading towards the terminus of the molecule)

[chemical structure]

[0236] B Illustrating a 5′-5′ reversed bond (and also showing the 3′-5′ direction of the last phosphodiester bond between the two abasic molecules reading towards the terminus of the molecule)

[chemical structure]

[0237] The abasic nucleoside or abasic nucleosides present in the nucleic acid are provided in the presence of a reversed internucleoside linkage or linkages, namely a 5′-5′ or a 3′-3′ reversed internucleoside linkage. A reversed linkage occurs as a result of a change of orientation of an adjacent nucleoside sugar, such that the sugar will have a 3′-5′ orientation as opposed to the conventional 5′-3′ orientation (with reference to the numbering of ring atoms on the nucleoside sugars). The abasic nucleoside or nucleosides as present in the nucleic acids of the invention preferably include such inverted nucleoside sugars.

[0238] In the case of a terminal nucleoside having an inverted orientation, then this will result in an “inverted” end configuration for the overall nucleic acid. Whilst certain structures drawn and referenced herein are represented using conventional 5′-3′ direction (with reference to the numbering of ring atoms on the nucleoside sugars), it will be appreciated that the presence of a terminal nucleoside having a change of orientation and a proximal 3′-3′ reversed linkage, will result in a nucleic acid having an overall 5′-5′ end structure (i.e. the conventional 3′ end nucleoside becomes a 5′ end nucleoside). Alternatively, it will be appreciated that the presence of a terminal nucleoside having a change of orientation and a proximal 5′-5′ reversed linkage will result in a nucleic acid with an overall 3′-3′ end structure.

[0239] The proximal 3′-3′ or 5′-5′ reversed linkage as herein described, may comprise the reversed linkage being directly adjacent/attached to a terminal nucleoside having an inverted orientation, such as a single terminal nucleoside having an inverted orientation. Alternatively, the proximal 3′-3′ or 5′-5′ reversed linkage as herein described, may comprise the reversed linkage being adjacent 2, or more than 2, nucleosides having an inverted orientation, such as 2, or more than 2, terminal region nucleosides having an inverted orientation, such as the terminal and penultimate nucleosides. In this way, the reversed linkage may be attached to a penultimate nucleoside having an inverted orientation. While a skilled addressee will appreciate that inverted orientations as described above can result in nucleic acid molecules having overall 3′-3′ or 5′-5′ end structures as described herein, it will also be appreciated that with the presence of one or more additional reversed linkages and/or nucleosides having an inverted orientation, then the overall nucleic acid may have 3′-5′ end structures corresponding to the conventionally positioned 5′/3′ ends.

[0240] In one aspect the nucleic acid may have a 3′-3′ reversed linkage, and the terminal sugar moiety may comprise a 5′ OH rather than a 5′ phosphate group at the 5′ position of that terminal sugar.

[0241] A skilled person would therefore clearly understand that 5′-5′, 3′-3′ and 3′-5′ (reading in the direction of that terminus) end variants of the more conventional 5′-3′ structures (with reference to the numbering of ring atoms on the end nucleoside sugars) drawn herein are included in the scope of the disclosure, where a reversed linkage or linkages is/are present.

[0242] In the situation of e.g. a reversed internucleoside linkage and/or one or more nucleosides having an inverted orientation creating an inverted end, and where the relative position of a linkage (e.g. to a linker) or the location of an internal feature (such as a modified nucleoside) is defined relative to the 5′ or 3′ end of the nucleic acid, then the 5′ or 3′ end is the conventional 5′ or 3′ end which would have existed had a reversed linkage not been in place, and wherein the conventional 5′ or 3′ end is determined by consideration of the directionality of the majority of the internal nucleoside linkages and/or nucleoside orientation within the nucleic acid. It is possible to tell from these internal bonds and/or nucleoside orientation which ends of the nucleic acid would constitute the conventional 5′ and 3′ ends (with reference to the numbering of ring atoms on the end nucleoside sugars) of the molecule absent the reversed linkage.

[0243] For example, in the structure shown below there are abasic residues in the first 2 positions located at the “5′” end. Where the terminal nucleoside has an inverted orientation then the “5′” end indicated in the diagram below, which is the conventional 5′ end, can in fact comprise a 3′ OH in view of the inverted nucleoside at the terminal position. Nevertheless the majority of the molecule will comprise conventional internucleoside linkages that run from the 3′ OH of the sugar to the 5′ phosphate of the next sugar, when reading in the standard 5′ [PO4] to 3′ [OH] direction of a nucleic acid molecule (with reference to the numbering of ring atoms on the nucleoside sugars), which can be used to determine the conventional 5′ and 3′ ends that would be found absent the inverted end configuration.

| | |
|---|---|
| A | 5′ A-A-Me-Me-Me-Me-Me-Me-F-Me-F-F-F-Me-Me-Me-Me- |
| | Me-Me-Me-Me-Me-Me 3′ |

[0244] The reversed bond is preferably located at the end of the nucleic acid e.g. RNA which is distal to a ligand moiety, such as a GalNAc containing portion, of the molecule.

[0245] GalNAc-siRNA constructs with a 5′-GalNAc on the sense strand can have a reversed linkage on the opposite end of the sense strand.

[0246] GalNAc-siRNA constructs with a 3′-GalNAc on the sense strand can have a reversed linkage on the opposite end of the sense strand.

### Nucleic Acid Lengths

[0247] In one aspect the i) the first strand of the nucleic acid has a length in the range of 17 to 30 nucleosides, preferably 19 to 25 nucleosides, more preferably 19 or 23 nucleosides; and/or ii) the second strand of the nucleic acid has a length in the range of 17 to 30 nucleosides, preferably 19 to 25 nucleosides, more preferably 19 or 21 nucleosides.

[0248] Typically, the duplex region of the nucleic acid is between 17 and 30 nucleosides in length, more preferably is 19 or 21 nucleosides in length. Similarly, the region of complementarity between the first strand and the portion of RNA transcribed from the B4GALT1 gene is between 17 and 30 nucleosides in length.

[0249] In one aspect the i) the first strand of the nucleic acid has a length in the range of 15 to 30 nucleosides, preferably 19 to 25 nucleosides, more preferably 23 or 25; and/or
[0250] ii) the second strand of the nucleic acid has a length in the range of 15 to 30 nucleosides, preferably 19 to 25 nucleosides, more preferably 23.

[0251] Generally, the duplex structure of the nucleic acid e.g. an iRNA is about 15 to 30 base pairs in length, e.g., 15-29, 15-28, 15-27, 15-26, 15-25, 15-24, 15-23, 15-22, 15-21, 15-20, 15-19, 15-18, 15-17, 18-30, 18-29, 18-28, 18-27, 18-26, 18-25, 18-24, 18-23, 18-22, 18-21, 18-20, 19-30, 19-29, 19-28, 19-27, 19-26, 19-25, 19-24, 19-23, 19-22, 19-21, 19-20, 20-30, 20-29, 20-28, 20-27, 20-26, 20-25, 20-24,20-23, 20-22, 20-21, 21-30, 21-29, 21-28, 21-27, 21-26, 21-25, 21-24, 21-23, or 21-22 base pairs in length. Ranges and lengths intermediate to the above recited ranges and lengths are also contemplated to be part of the invention.

[0252] Similarly, the region of complementarity of an antisense sequence to a target sequence and/or the region of complementarity of an antisense sequence to a sense sequence is about 15 to 30 nucleosides in length, e.g., 15-29, 15-28, 15-27, 15-26, 15-25, 15-24, 15-23, 15-22, 15-21, 15-20, 15-19, 15-18, 15-17, 18-30, 18-29, 18-28, 18-27, 18-26, 18-25, 18-24, 18-23, 18-22, 18-21, 18-20, 19-30, 19-29, 19-28, 19-27, 19-26, 19-25, 19-24, 19-23, 19-22, 19-21, 19-20, 20-30, 20-29, 20-28, 20-27, 20-26, 20-25, 20-24,20-23, 20-22, 20-21, 21-30, 21-29, 21-28, 21-27, 21-26, 21-25, 21-24, 21-23, or 21-22 nucleosides in length. Ranges and lengths intermediate to the above recited ranges and lengths are also contemplated to be part of the invention.

[0253] In certain preferred embodiments, the region of complementarity of an antisense sequence to a target sequence and/or the region of complementarity of an antisense sequence to a sense sequence is at least 17 nucleosides in length. For example, the region of complementarity between the antisense strand and the target is 19 to 21 nucleosides in length, for example, the region of complementarity is 21 nucleosides in length.

[0254] In preferred embodiments, each strand is no more than 30 nucleosides in length.

[0255] In certain embodiments, the duplex structure of the nucleic acid e.g. an siRNA is 19 base pairs in length. In particularly preferred embodiment, the duplex may have the following structure:

[0256] A nucleic acid e.g. a dsRNA as described herein can further include one or more single-stranded nucleoside overhangs e.g., 1-4, 2-4, 1-3, 2-3, 1, 2, 3, or 4 nucleosides. A nucleoside overhang can comprise or consist of a nucleoside/nucleoside analog, including a deoxynucleoside/nucleoside. The overhang(s) can be on the sense strand, the antisense strand, or any combination thereof. Furthermore, the nucleoside(s) of an overhang can be present on the 5′-end, 3′-end, or both ends of an antisense or sense strand of a nucleic acid e.g. a dsRNA.

[0257] In certain preferred embodiments, at least one strand comprises a 3′ overhang of at least 1 nucleoside, e.g., at least one strand comprises a 3′ overhang of at least 2 nucleosides. The overhang is suitably on the antisense/guide strand and/or the sense/passenger strand.

### Nucleic Acid Modifications

[0258] In certain embodiments, the nucleic acid, e.g. an RNA of the invention e.g., a dsiRNA, does not comprise further modifications, e.g., chemical modifications or conjugations known in the art and described herein.

[0259] In other preferred embodiments, the nucleic acid e.g. RNA of the invention, e.g., a dsiRNA, is further chemically modified to enhance stability or other beneficial characteristics.

[0260] In certain embodiments of the invention, substantially all of the nucleosides are modified.

[0261] The nucleic acids featured in the invention can be synthesized or modified by methods well established in the art, such as those described in “Current protocols in nucleic acid chemistry,” Beaucage, S. L. et al. (Edrs.), John Wiley & Sons, Inc., New York, NY, USA, which is hereby incorporated herein by reference.

[0262] Modifications include, for example, end modifications, e.g., 5′-end modifications (phosphorylation, conjugation, inverted linkages) or 3′-end modifications (conjugation, DNA nucleosides within an RNA, or RNA nucleosides within a DNA, inverted linkages, etc.); base modifications, e.g., replacement with stabilizing bases, destabilizing bases, or bases that base pair with an expanded repertoire of partners, conjugated bases; sugar modifications (e.g., at the 2′-position or 4′-position) or replacement of the sugar; or backbone modifications, including modification or replacement of the phosphodiester linkages.

[0263] Specific examples of nucleic acids such as siRNA compounds useful in the embodiments described herein include, but are not limited to RNAs containing modified backbones or no natural internucleoside linkages. Nucleic acids such as RNAs having modified backbones include, among others, those that do not have a phosphorus atom in the backbone. For the purposes of this specification, and as sometimes referenced in the art, modified nucleic acids e.g. RNAs that do not have a phosphorus atom in their internucleoside backbone can also be considered to be oligonucleosides. In some embodiments, a modified nucleic acid e.g. an siRNA will have a phosphorus atom in its internucleoside backbone.

[0264] Modified nucleic acid e.g. RNA backbones include, for example, phosphorothioates, chiral phosphorothioates, phosphorodithioates, phosphotriesters, aminoalkylphosphotriesters, methyl and other alkyl phosphonates including 3′-alkylene phosphonates and chiral phosphonates, phosphinates, phosphoramidates including 3′-amino phosphoramidate and aminoalkylphosphoramidates, thionophosphoramidates, thionoalkylphosphonates, thionoalkylphosphotriesters, and boranophosphates having normal 3′-5′ linkages, 2′-5′-linked analogs of these, and those having inverted polarity wherein the adjacent pairs of nucleoside units are linked 5′-3′ or 5′-2′. Various salts, mixed salts and free acid forms are also included.

[0265] Modified nucleic acids e.g. RNAs can also contain one or more substituted sugar moieties. The nucleic acids e.g. siRNAs, e.g., dsiRNAs, featured herein can include one of the following at the 2′-position: OH; F; O-, S-, or N-alkyl; O-, S-, or N-alkenyl; O-, S- or N-alkynyl; or O-alkyl-O-alkyl, wherein the alkyl, alkenyl and alkynyl can be substituted or unsubstituted. 2′ O-methyl and 2′-F are preferred modifications.

[0266] In certain preferred embodiments, the nucleic acid comprises at least one modified nucleoside.

[0267] The nucleic acid of the invention may comprise one or more modified nucleosides on the first strand and/or the second strand.

[0268] In some embodiments, substantially all of the nucleosides of the sense strand and all of the nucleosides of the antisense strand comprise a modification.

[0269] In some embodiments, all of the nucleosides of the sense strand and substantially all of the nucleosides of the antisense strand comprise a modification.

[0270] In some embodiments, all of the nucleosides of the sense strand and all of the nucleosides of the antisense strand comprise a modification.

[0271] In one embodiment, at least one of the modified nucleosides is selected from the group consisting of a deoxy-nucleoside, a 3′-terminal deoxy-thymine (dT) nucleoside, a 2-O-methyl modified nucleoside (also called herein 2′-Me, where Me is a methoxy), a 2′-fluoro modified nucleoside, a 2′-deoxy-modified nucleoside, a locked nucleoside, an unlocked nucleoside, a conformationally restricted nucleoside, a constrained ethyl nucleoside, an abasic nucleoside, a 2′-amino-modified nucleoside, a 2′-O-allyl-modified nucleoside, 2′-C-alkyl-modified nucleoside, 2′-hydroxly-modified nucleoside, a 2′-methoxyethyl modified nucleoside, a 2-O-alkyl-modified nucleoside, a morpholino nucleoside, a phosphoramidate, a non-natural base comprising nucleoside, a tetrahydropyran modified nucleoside, a 1,5-anhydrohexitol modified nucleoside, a cyclohexenyl modified nucleoside, a nucleoside comprising a phosphorothioate group, a nucleoside comprising a methylphosphonate group, a nucleoside comprising a 5′-phosphate, and a nucleoside comprising a 5′-phosphate mimic. In another embodiment, the modified nucleosides comprise a short sequence of 3′-terminal deoxy-thymine nucleosides (dT).

[0272] Modifications on the nucleosides may preferably be selected from the group including, but not limited to, LNA, HNA, CeNA, 2-methoxyethyl, 2′-O-alkyl, 2-O-allyl, 2′-C-allyl, 2′-fluoro, 2′-deoxy, 2′-hydroxyl, and combinations thereof. In another embodiment, the modifications on the nucleosides are 2′O-methyl (“2-Me”) or 2′-fluoro modifications.

[0273] One preferred modification is a modification at the 2′-OH group of the ribose sugar, optionally selected from 2′-Me or 2′-F modifications.

[0274] Preferred nucleic acid comprise one or more nucleosides on the first strand and/or the second strand which are modified, to form modified nucleosides, as follows:

[0275] A nucleic acid wherein the modification is a modification at the 2′-OH group of the ribose sugar, optionally selected from 2′-Me or 2′-F modifications.

[0276] A nucleic acid wherein the first strand comprises a 2′-F modification at any of position 2, position 6, position 14, or any combination thereof, counting from position 1 of said first strand.

[0277] A nucleic acid wherein the second strand comprises a 2′-F modification at any of position 7, position 9, position 11, or any combination thereof, counting from position 1 of said second strand.

[0278] A nucleic acid wherein the second strand comprises a 2′-F modification at position 7 and/or 9, and/or 11, and/or 13, counting from position 1 of said second strand.

[0279] A nucleic acid wherein the second strand comprises a 2′-F modification at position 7 and 9 and 11 counting from position 1 of said second strand.

[0280] A nucleic acid wherein the first and second strand each comprise 2′-Me and 2′-F modifications.

[0281] A nucleic which comprises at least one thermally destabilizing modification, suitably at one or more of positions 1 to 9 of the first strand counting from position 1 of the first strand, and/or at one or more of positions on the second strand aligned with positions 1 to 9 of the first strand, wherein the destabilizing modification is selected from a modified unlocked nucleic acid (UNA) and a glycol nucleic acid (GNA), preferably a glycol nucleic acid.

[0282] A nucleic acid wherein the nucleic acid comprises 3 or more 2′-F modifications at positions 7 to 13 of the second strand, such as 4, 5, 6 or 7 2′-F modifications at positions 7 to 13 of the second strand, counting from position 1 of said second strand.

[0283] A nucleic acid wherein said second strand comprises at least 3, such as 4, 5 or 6, 2′-Me modifications at positions 1 to 6 of the second strand, counting from position 1 of said second strand.

[0284] A nucleic acid wherein said first strand comprises at least 5 2′-Me consecutive modifications at the 3′ terminal region, preferably including the terminal nucleoside at the 3′ terminal region, or at least within 1 or 2 nucleosides from the terminal nucleoside at the 3′ terminal region.

[0285] A nucleic acid wherein said first strand comprises 7 2′-Me consecutive modifications at the 3′ terminal region, preferably including the terminal nucleoside at the 3′ terminal region.

[0286] A nucleic acid which comprises at least one thermally destabilizing modification at position 7 of the first strand, counting from position 1 of the first strand.

[0287] A nucleic acid which is an siRNA oligonucleoside, wherein the siRNA oligonucleoside comprises at least 3 2′-F modifications at positions 6 to 12 of the second strand, counting from position 1 of said second strand.

[0288] A nucleic acid which is an siRNA oligonucleoside, wherein said second strand comprises at least 3 2′-Me modifications at positions 1 to 6 of the second strand, counting from position 1 of said second strand.

[0289] A nucleic acid which is an siRNA oligonucleoside, wherein each of the first and second strands comprises an alternating modification pattern, preferably a fully alternating modification pattern along the entire length of each of the first and second strands, wherein the nucleosides of the first strand are modified by (i) 2′Me modifications on the odd numbered nucleosides counting from position 1 of the first strand, and (ii) 2′F modifications on the even numbered nucleosides counting from position 1 of the first strand, and nucleosides of the second strand are modified by (i) 2′F modifications on the odd numbered nucleosides counting from position 1 of the second strand, and (ii) 2′Me modifications on the even numbered nucleosides counting from position 1 of the second strand. Typically, such fully alternating modification patterns are present in a blunt ended oligonucleoside, wherein each of the first and second strands are 19 or 23 nucleosides in length.

[0290] Position 1 of the first or the second strand is the nucleoside which is the closest to the end of the nucleic acid (ignoring any abasic nucleosides) and that is joined to an adjacent nucleoside (at Position 2) via a 3′ to 5′ internal bond, with reference to the bonds between the sugar moieties of the backbone, and reading in a direction away from that end of the molecule.

[0291] It can therefore be seen that “position 1 of the sense strand” is the 5′ most nucleoside (not including abasic nucleosides) at the conventional 5′ end of the sense strand. Typically, the nucleoside at this position 1 of the sense strand will be equivalent to the 5′ nucleoside of the selected target nucleic acid sequence, and more generally the sense strand will have equivalent nucleosides to those of the target nucleic acid sequence starting from this position 1 of the sense strand, whilst also allowing for acceptable mismatches between the sequences.

[0292] As used herein, “position 1 of the antisense strand” is the 5′ most nucleoside (not including abasic nucleosides) at the conventional 5′ end of the antisense strand. As hereinbefore described, there will be a region of complementarity between the sense and antisense strands, and in this way the antisense strand will also have a region of complementarity to the target nucleic acid sequence as referred to above.

[0293] In certain embodiments, the nucleic acid e.g. RNAi agent further comprises at least one phosphorothioate or methylphosphonate internucleoside linkage. For example the phosphorothioate or methylphosphonate internucleoside linkage can be at the 3′-terminus or in the terminal region of one strand, i.e., the sense strand or the antisense strand; or at the ends of both strands, the sense strand and the antisense strand.

[0294] In certain embodiments, the phosphorothioate or methylphosphonate internucleoside linkage is at the 5′terminus or in the terminal region of one strand, i.e., the sense strand or the antisense strand; or at the ends of both strands, the sense strand and the antisense strand.

[0295] In certain embodiments, a phosphorothioate or a methylphosphonate internucleoside linkage is at both the 5′- and 3′-terminus or in the terminal region of one strand, i.e., the sense strand or the antisense strand; or at the ends of both strands, the sense strand and the antisense strand.

[0296] Any nucleic acid may comprise one or more phosphorothioate (PS) modifications within the nucleic acid, such as at least two PS internucleoside bonds at the ends of a strand.

[0297] At least one of the oligoribonucleoside strands preferably comprises at least two consecutive phosphorothioate modifications in the last 3 nucleosides of the oligonucleoside.

[0298] The invention therefore also relates to: A nucleic acid disclosed herein which comprises phosphorothioate internucleoside linkages respectively between at least two or three consecutive positions, such as in a 5′ and/or 3′ terminal region and/or near terminal region of the second strand, whereby said near terminal region is preferably adjacent said terminal region wherein said one or more abasic nucleosides of said second strand is/are located.

[0299] A nucleic acid disclosed herein which comprises phosphorothioate internucleoside linkages respectively between at least two or three consecutive positions in a 5′ and/or 3′ terminal region of the first strand, whereby preferably the terminal position at the 5′ and/or 3′ terminal region of said first strand is attached to its adjacent position by a phosphorothioate internucleoside linkage.

[0300] The nucleic acid strand may be an RNA comprising a phosphorothioate internucleoside linkage between the three nucleosides contiguous with 2 terminally located abasic nucleosides.

[0301] A preferred nucleic acid is a double stranded RNA comprising 2 adjacent abasic nucleosides at the 5′ terminus of the second strand and a ligand moiety comprising one or more GalNAc ligand moieties at the opposite 3′ end of the second strand. Further preferred, the same nucleic acid may also comprise a phosphorothioate bond between nucleotides at positions 3-4 and 4-5 of the second strand, reading from the position 1 of the second strand. Further preferred, the same nucleic acid may also comprise a 2′ F modification at positions 7, 9 and 11 of the second strand.

[0302] Preferred modifications of nucleic acids having the structure

are as follows:

[0303] A nucleic acid wherein modified nucleosides of the first strand have a modification pattern according to (5′-3′):

Me - F - Me - F - Me - F - Me - F - Me - F - Me -
F - Me - F - Me - F - Me - F - Me.

[0304] A nucleic acid wherein modified nucleosides of said second strand have a modification pattern according to (5′-3′):

F(s)Me(s)F - Me - F - Me - F - Me - F - Me - F -
Me - F - Me - F - Me - F - Me - F,
or
F - Me - F - Me - F - Me - F - Me - F - Me - F -
Me - F - Me - F - Me - F(s)Me(s)F;

wherein (s) is a phosphorothioate internucleoside linkage.

[0305] A nucleic acid wherein modified nucleosides of the second strand have a modification pattern according to (5′-3′):

F - Me - F - Me - F - Me - F - Me - F - Me - F -
Me - F - Me - F - Me - F - Me - F.

[0306] A nucleic acid wherein modified nucleosides of said second strand have a modification pattern according to (5′-3′):

F(s)Me(s)F - Me - F - Me - F - Me - F - Me - F -
Me - F - Me - F - Me - F - Me - F,
or
F - Me - F - Me - F - Me - F - Me - F - Me - F -
Me - F - Me - F - Me - F(s)Me(s)F;

wherein (s) is a phosphorothioate internucleoside linkage.

[0307] A nucleic acid wherein modified nucleosides of said second strand have a modification pattern according to (5′-3′):

ia - ia - F - Me - F - Me - F - Me - F - Me - F -
Me - F - Me - F - Me - F - Me - F - Me - F,
or
F - Me - F - Me - F - Me - F - Me - F - Me - F -
Me - F - Me - F - Me - F - Me - F - ia - ia;

wherein ia represents an inverted abasic nucleoside. In certain embodiments, the inverted abasic nucleosides as represented by ia-ia are present in a 2 nucleoside overhang.

[0308] A nucleic acid wherein modified nucleosides of said second strand have a modification pattern according to any one of the following (5′-3′):

ia - ia - F(s)Me(s)F - Me - F - Me - F - Me - F -
Me - F - Me - F - Me - F - Me - F - Me - F,
or
F - Me - F - Me - F - Me - F - Me - F - Me - F -
Me - F - Me - F - Me - F - Me(s)F(s)ia - ia;

wherein (s) is a phosphorothioate internucleoside linkage and ia represents an inverted abasic nucleoside. In certain embodiments, the inverted abasic nucleosides as represented by ia-ia are present in a 2 nucleoside overhang.

[0309] Preferred modifications of nucleic acids having the structure

are as follows:

[0310] A nucleic acid wherein modified nucleosides of said second strand comprise a modification pattern according to any one of the following (5′-3′):

Me - Me - Me - Me - Me - Me - F - F - F - F - F -
Me - Me - Me - Me - Me - Me - Me - F - Me - Me,
or
Me - Me - Me - Me - Me - F - F - Me - F - F - F -
F - Me - Me - Me - Me - Me - Me - Me - Me - Me,
or
Me - Me - Me - Me - Me - Me -F- Me - F - F - F -
F - Me - Me - Me - Me - Me - Me - Me - Me - Me,
or
Me - Me - Me - Me - Me - Me - Me - Me - F - F -
F - Me - Me - Me - Me - Me - Me - Me - Me - Me -
Me,
or
Me - Me - Me - Me - Me - Me - F - Me - F - F - F -
Me - Me - Me - Me - Me - Me - Me - Me - Me - Me.

[0311] A nucleic acid wherein modified nucleosides of said second strand comprise a modification pattern according to any one of the following (5′-3′):

Me(s)Me(s)Me - Me - Me - Me - F - F - F - F - F -
Me - Me - Me - Me - Me - Me - Me - F - Me - Me,
or
Me(s)Me(s)Me - Me - Me - F - F - Me - F - F - F -
F - Me - Me - Me - Me - Me - Me - Me - Me - Me,
or
Me(s)Me(s)Me - Me - Me - Me -F- Me - F - F - F -
F - Me - Me - Me - Me - Me - Me - Me - Me - Me,
or
Me(s)Me(s)Me - Me - Me - Me - Me - Me - F - F -
F - Me - Me - Me - Me - Me - Me - Me - Me - Me -
Me,
or
Me(s)Me(s)Me - Me - Me - Me - F - Me - F - F - F -
Me - Me - Me - Me - Me - Me - Me - Me - Me - Me,
or
Me - Me - Me - Me - Me - Me - F - F - F - F - F -
Me - Me - Me - Me - Me - Me - Me - F(s)Me(s)Me,
or
Me - Me - Me - Me - Me - F - F - Me - F - F - F -
F - Me - Me - Me - Me - Me - Me - Me(s)Me(s)Me,
or
Me - Me - Me - Me - Me - Me -F- Me - F - F - F -
F - Me - Me - Me - Me - Me - Me - Me(s)Me(s)Me,
or
Me - Me - Me - Me - Me - Me - Me - Me - F - F -
F - Me - Me - Me - Me - Me - Me - Me -
Me(s)Me(s)Me,
or
Me - Me - Me - Me - Me - Me - F - Me - F - F - F -
Me - Me - Me - Me - Me - Me - Me - Me(s)Me(s)Me,

wherein (s) is a phosphorothioate internucleoside linkage.

[0312] A nucleic acid wherein modified nucleosides of said second strand comprise a modification pattern according to any one of the following (5′-3′):

ia - ia - Me - Me - Me - Me - Me - Me - F - F -
F - F - F - Me - Me - Me - Me - Me - Me - Me - F -
Me - Me,
or
ia - ia - Me - Me - Me - Me - Me - F - F - Me -
F - F - F - F - Me - Me - Me - Me - Me - Me - Me -
Me - Me,
or
ia - ia - Me - Me - Me - Me - Me - Me -F- Me - F -
F - F - F - Me - Me - Me - Me - Me - Me - Me -
Me - Me,
or
ia - ia - Me - Me - Me - Me - Me - Me - Me - Me -
F - F - F - Me - Me - Me - Me - Me - Me - Me -
Me - Me - Me,
or
ia - ia - Me - Me - Me - Me - Me - Me - F - Me -
F - F - F - Me - Me - Me - Me - Me - Me - Me -
Me - Me - Me,
or
Me - Me - Me - Me - Me - Me - F - F - F - F - F -
Me - Me - Me - Me - Me - Me - Me - F - Me - Me -
ia - ia,
or
Me - Me - Me - Me - Me - F - F - Me - F - F - F -
F - Me - Me - Me - Me - Me - Me - Me - Me - Me -
ia - ia,
or
Me - Me - Me - Me - Me - Me -F- Me - F - F - F -
F - Me - Me - Me - Me - Me - Me - Me - Me - Me -
ia - ia,
or
Me - Me - Me - Me - Me - Me - Me - Me - F - F -
F - Me - Me - Me - Me - Me - Me - Me - Me - Me -
Me - ia - ia,
or
Me - Me - Me - Me - Me - Me - F - Me - F - F - F -
Me - Me - Me - Me - Me - Me - Me - Me - Me - Me-
ia - ia,

wherein ia represents an inverted abasic nucleoside, and when the inverted abasic nucleosides as represented by ia-ia are present at the 3′ terminus of the second strand, said inverted abasic nucleosides are present in a 2 nucleoside overhang.

[0313] A nucleic acid wherein modified nucleosides of said second strand comprise a modification pattern according to any one of the following (5′-3′):

ia - ia - Me(s)Me(s)Me - Me - Me - Me - F - F -
F - F - F - Me - Me - Me - Me - Me - Me - Me - F -
Me - Me,
or
ia - ia - Me(s)Me(s)Me - Me - Me - F - F - Me -
F - F - F - F - Me - Me - Me - Me - Me - Me - Me -
Me - Me,
or
ia - ia - Me(s)Me(s)Me - Me - Me - Me -F- Me - F -
F - F - F - Me - Me - Me - Me - Me - Me - Me -
Me - Me,
or
ia - ia - Me(s)Me(s)Me - Me - Me - Me - Me - Me -
F - F - F - Me - Me - Me - Me - Me - Me - Me -
Me - Me - Me,
or
ia - ia - Me(s)Me(s)Me - Me - Me - Me - F - Me -
F - F - F - Me - Me - Me - Me - Me - Me - Me -
Me - Me - Me,
or
Me - Me - Me - Me - Me - Me - F - F - F - F - F -
Me - Me - Me - Me - Me - Me - Me - F(s)Me(s)Me -
ia - ia,
or
Me - Me - Me - Me - Me - F - F - Me - F - F - F -
F - Me - Me - Me - Me - Me - Me - Me(s)Me(s)Me -
ia - ia,
or
Me - Me - Me - Me - Me - Me -F- Me - F - F - F -
F - Me - Me - Me - Me - Me - Me - Me(s)Me(s)Me -
ia - ia,
or
Me - Me - Me - Me - Me - Me - Me - Me - F - F -
F - Me - Me - Me - Me - Me - Me - Me -
Me(s)Me(s)Me - ia - ia,
or
Me - Me - Me - Me - Me - Me - F - Me - F - F -
F - Me - Me - Me - Me - Me - Me - Me -
Me(s)Me(s)Me - ia - ia,

wherein:
[0314] (s) is a phosphorothioate internucleoside linkage, ia represents an inverted abasic nucleoside, and when the inverted abasic nucleosides as represented by ia-ia are present at the 3′ terminus of the second strand, said inverted abasic nucleosides are present in a 2 nucleoside overhang.

[0315] A nucleic acid wherein modified nucleosides comprise any one of the following modification patterns:

Modification pattern 1:
Second strand (5′-3′):
Me - Me - Me - Me - Me - Me - F - F - F - F - F -
Me - Me - Me - Me - Me - Me - Me - F - Me - Me,
First strand (5′-3′):
Me - F - Me - F - Me - F - Me - F - F - Me - Me -
Me - Me - F - Me - F - Me - Me - Me - Me - Me -
Me - Me
Or
Modification pattern 2:
Second strand (5′-3′):
Me - Me - Me - Me - Me - F - F - Me - F - F - F -
F - Me - Me - Me - Me - Me - Me - Me - Me - Me,
First strand (5′-3′):
Me - F - Me - F - Me - F - Me - F - F - Me - Me -
Me - Me - F - Me - F - Me - Me - Me - Me - Me -
Me - Me
Or
Modification pattern 3:
Second strand (5′-3′):
Me - Me - Me - Me - Me - Me -F- Me - F - F - F -
F - Me - Me - Me - Me - Me - Me - Me - Me - Me,
First strand (5′-3′):
Me - F - Me - F - Me - F - Me - F - F - Me - Me -
Me - Me - F - Me - F - Me - Me - Me - Me - Me -
Me - Me
Or
Modification pattern 4:
Second strand (5′-3′):
Me - Me - Me - Me - Me - Me - F - Me - F - F - F -
F - Me - Me - Me - Me - Me - Me - Me - Me - Me,
First strand (5′-3′):
Me - F - Me - F - Me - F - Me - Me - Me - Me -
Me - Me - Me - F - Me - F - Me - Me - Me - Me -
Me - Me - Me
Or
Modification pattern 5:
Second strand (5′-3′):
Me - Me - Me - Me - Me - Me - Me - Me - F - F -
F - Me - Me - Me - Me - Me - Me - Me - Me - Me -
Me,
First strand (5′-3′):
Me - F - Me - Me - Me - F - Me - Me - F - Me -
Me - Me - Me - F - Me - F - Me - Me - Me - Me -
Me - Me - Me
Or
Modification pattern 6:
Second strand (5′-3′):
Me - Me - Me - Me - Me - Me - F - Me - F - F - F -
Me - Me - Me - Me - Me - Me - Me - Me - Me - Me,
First strand (5′-3′):
Me - F - Me - Me - Me - F - Me - Me - F - Me -
Me - Me - Me - F - Me - F - Me - Me - Me - Me -
Me - Me - Me.

[0316] A nucleic acid wherein modified nucleosides comprise any one of the following modification patterns:

Modification pattern 1:
Second strand (5′-3′):
Me(s)Me(s)Me - Me - Me - Me - F - F - F - F - F -
Me - Me - Me - Me - Me - Me - Me - F - Me - Me,
First strand (5′-3′):
Me(s)F(s)Me - F - Me - F - Me - F - F - Me - Me -
Me - Me - F - Me - F - Me - Me - Me - Me -
Me(s)Me(s)Me
Or
Modification pattern 2:
Second strand (5′-3′):
Me(s)Me(s)Me - Me - Me - F - F - Me - F - F - F -
F - Me - Me - Me - Me - Me - Me - Me - Me - Me,
First strand (5′-3′):
Me(s)F(s)Me - F - Me - F - Me - F - F - Me - Me -
Me - Me - F - Me - F - Me - Me - Me - Me -
Me(s)Me(s)Me
Or
Modification pattern 3:
Second strand (5′-3′):
Me(s)Me(s)Me - Me - Me - Me -F- Me - F - F - F -
F - Me - Me - Me - Me - Me - Me - Me - Me - Me,
First strand (5′-3′):
Me(s)F(s)Me - F - Me - F - Me - F - F - Me - Me -
Me - Me - F - Me - F - Me - Me - Me - Me -
Me(s)Me(s)Me
Or
Modification pattern 4:
Second strand (5′-3′):
Me(s)Me(s)Me - Me - Me - Me - F - Me - F - F - F -
F - Me - Me - Me - Me - Me - Me - Me - Me - Me,
First strand (5′-3′):
Me(s)F(s)Me - F - Me - F - Me - Me - Me - Me -
Me - Me - Me - F - Me - F - Me - Me - Me - Me -
Me(s)Me(s)Me
Or
Modification pattern 5:
Second strand (5′-3′):
Me(s)Me(s)Me - Me - Me - Me - Me - Me - F - F -
F - Me - Me - Me - Me - Me - Me - Me - Me - Me -
Me,
First strand (5′-3′):
Me(s)F(s)Me - Me - Me - F - Me - Me - F - Me -
Me - Me - Me - F - Me - F - Me - Me - Me - Me -
Me(s)Me(s)Me
Or
Modification pattern 6:
Second strand (5′-3′):
Me(s)Me(s)Me - Me - Me - Me - F - Me - F - F - F -
Me - Me - Me - Me - Me - Me - Me - Me - Me - Me,
First strand (5′-3′):
Me(s)F(s)Me - Me - Me - F - Me - Me - F - Me -
Me - Me - Me - F - Me - F - Me - Me - Me - Me -
Me(s)Me(s)Me

wherein (s) is a phosphorothioate internucleoside linkage.

[0317] A nucleic acid wherein modified nucleosides comprise any one of the following modification patterns:

Modification pattern 1:
Second strand (5′-3′):
Me - Me - Me - Me - Me - Me - F - F - F - F - F -
Me - Me - Me - Me - Me - Me - Me - F(s)Me(s)Me,
First strand (5′-3′):
Me(s)F(s)Me - F - Me - F - Me - F - F - Me - Me -
Me - Me - F - Me - F - Me - Me - Me - Me -
Me(s)Me(s)Me
Or
Modification pattern 2:
Second strand (5′-3′):
Me - Me - Me - Me - Me - F - F - Me - F - F - F -
F - Me - Me - Me - Me - Me - Me - Me(s)Me(s)Me,
First strand (5′-3′):
Me(s)F(s)Me - F - Me - F - Me - F - F - Me - Me -
Me - Me - F - Me - F - Me - Me - Me - Me -
Me(s)Me(s)Me
Or
Modification pattern 3:
Second strand (5′-3′):
Me - Me - Me - Me - Me - Me -F- Me - F - F - F -
F - Me - Me - Me - Me - Me - Me - Me(s)Me(s)Me,
First strand (5′-3′):
Me(s)F(s)Me - F - Me - F - Me - F - F - Me - Me -
Me - Me - F - Me - F - Me - Me - Me - Me -
Me(s)Me(s)Me
Or
Modification pattern 4:
Second strand (5′-3′):
Me - Me - Me - Me - Me - Me - F - Me - F - F - F -
F - Me - Me - Me - Me - Me - Me - Me(s)Me(s)Me,
First strand (5′-3′):
Me(s)F(s)Me - F - Me - F - Me - Me - Me - Me -
Me - Me - Me - F - Me - F - Me - Me - Me - Me -
Me(s)Me(s)Me
Or
Modification pattern 5:
Second strand (5′-3′):
Me - Me - Me - Me - Me - Me - Me - Me - F - F -
F - Me - Me - Me - Me - Me - Me - Me -
Me(s)Me(s)Me,
First strand (5′-3′):
Me(s)F(s)Me - Me - Me - F - Me - Me - F - Me -
Me - Me - Me - F - Me - F - Me - Me - Me - Me -
Me(s)Me(s)Me
Or
Modification pattern 6:
Second strand (5′-3′):
Me - Me - Me - Me - Me - Me - F - Me - F - F - F -
Me - Me - Me - Me - Me - Me - Me - Me(s)Me(s)Me,
First strand (5′-3′):
Me(s)F(s)Me - Me - Me - F - Me - Me - F - Me -
Me - Me - Me - F - Me - F - Me - Me - Me - Me -
Me(s)Me(s)Me

wherein (s) is a phosphorothioate internucleoside linkage.

[0318] A nucleic acid wherein modified nucleosides comprise any one of the following modification patterns:

Modification pattern 1:
Second strand (5′-3′):
ia - ia - Me - Me - Me - Me - Me - Me - F - F -
F - F - F - Me - Me - Me - Me - Me - Me - Me - F -
Me - Me,
First strand (5′-3′):
Me - F - Me - F - Me - F - Me - F - F - Me - Me -
Me - Me - F - Me - F - Me - Me - Me - Me - Me -
Me - Me
Or
Modification pattern 2:
Second strand (5′-3′):
ia - ia - Me - Me - Me - Me - Me - F - F - Me -
F - F - F - F - Me - Me - Me - Me - Me - Me - Me -
Me - Me,
First strand (5′-3′):
Me - F - Me - F - Me - F - Me - F - F - Me - Me -
Me - Me - F - Me - F - Me - Me - Me - Me - Me -
Me - Me
Or
Modification pattern 3:
Second strand (5′-3′):
ia - ia - Me - Me - Me - Me - Me - Me - F - Me -
F - F - F - F - Me - Me - Me - Me - Me - Me - Me -
Me - Me,
First strand (5′-3′):
Me - F - Me - F - Me - F - Me - F - F - Me - Me -
Me - Me - F - Me - F - Me - Me - Me - Me - Me -
Me - Me
Or
Modification pattern 4:
Second strand (5′-3′):
ia - ia - Me - Me - Me - Me - Me - Me - F - Me -
F - F - F - F - Me - Me - Me - Me - Me - Me - Me -
Me - Me,
First strand (5′-3′):
Me - F - Me - F - Me - F - Me - Me - Me - Me -
Me - Me - Me - F - Me - F - Me - Me - Me - Me -
Me - Me - Me
Or
Modification pattern 5:
Second strand (5′-3′):
ia - ia - Me - Me - Me - Me - Me - Me - Me - Me -
F - F - F - Me - Me - Me - Me - Me - Me - Me -
Me - Me - Me,
First strand (5′-3′):
Me - F - Me - Me - Me - F - Me - Me - F - Me -
Me - Me - Me - F - Me - F - Me - Me - Me - Me -
Me - Me - Me
Or
Modification pattern 6:
Second strand (5′-3′):
ia - ia - Me - Me - Me - Me - Me - Me - F - Me -
F - F - F - Me - Me - Me - Me - Me - Me - Me -
Me - Me - Me,
First strand (5′-3′):
Me - F - Me - Me - Me - F - Me - Me - F - Me -
Me - Me - Me - F - Me - F - Me - Me - Me - Me -
Me - Me - Me,

wherein ia represents an inverted abasic nucleoside.

[0319] A nucleic acid wherein modified nucleosides comprise any one of the following modification patterns:

Modification pattern 1:
Second strand (5′-3′):
Me - Me - Me - Me - Me - Me - F - F - F - F - F -
Me - Me - Me - Me - Me - Me - Me - F - Me - Me -
ia - ia,
First strand (5′-3′):
Me - F - Me - F - Me - F - Me - F - F - Me - Me -
Me - Me - F - Me - F - Me - Me - Me - Me - Me -
Me - Me
Or
Modification pattern 2:
Second strand (5′-3′):
Me - Me - Me - Me - Me - F - F - Me - F - F - F -
F - Me - Me - Me - Me - Me - Me - Me - Me - Me -
ia - ia,
First strand (5′-3′):
Me - F - Me - F - Me - F - Me - F - F - Me - Me -
Me - Me - F - Me - F - Me - Me - Me - Me - Me -
Me - Me
Or
Modification pattern 3:
Second strand (5′-3′):
Me - Me - Me - Me - Me - Me -F- Me - F - F - F -
F - Me - Me - Me - Me - Me - Me - Me - Me - Me -
ia - ia,
First strand (5′-3′):
Me - F - Me - F - Me - F - Me - F - F - Me - Me -
Me - Me - F - Me - F - Me - Me - Me - Me - Me -
Me - Me
Or
Modification pattern 4:
Second strand (5′-3′):
Me - Me - Me - Me - Me - Me - F - Me - F - F - F -
F - Me - Me - Me - Me - Me - Me - Me - Me - Me -
ia - ia,
First strand (5′-3′):
Me - F - Me - F - Me - F - Me - Me - Me - Me -
Me - Me - Me - F - Me - F - Me - Me - Me - Me -
Me - Me - Me
Or
Modification pattern 5:
Second strand (5′-3′):
Me - Me - Me - Me - Me - Me - Me - Me - F - F -
F - Me - Me - Me - Me - Me - Me - Me - Me - Me -
Me - ia - ia,
First strand (5′-3′):
Me - F - Me - Me - Me - F - Me - Me - F - Me -
Me - Me - Me - F - Me - F - Me - Me - Me - Me -
Me - Me - Me
Or
Modification pattern 6:
Second strand (5′-3′):
Me - Me - Me - Me - Me - Me - F - Me - F - F - F -
Me - Me - Me - Me - Me - Me - Me - Me - Me - Me -
ia - ia,
First strand (5′-3′):
Me - F - Me - Me - Me - F - Me - Me - F - Me -
Me - Me - Me - F - Me - F - Me - Me - Me - Me -
Me - Me - Me,

wherein ia represents an inverted abasic nucleoside, and when the inverted abasic nucleosides as represented by ia-ia are present at the 3′ terminus of the second strand, said inverted abasic nucleosides are present in a 2 nucleoside overhang.

[0320] A nucleic acid wherein modified nucleosides comprise any one of the following modification patterns:

Modification pattern 1:
Second strand (5′-3′):
ia - ia - Me(s)Me(s)Me - Me - Me - Me - F - F -
F - F - F - Me - Me - Me - Me - Me - Me - Me - F -
Me - Me,
First strand (5′-3′):
Me(s)F(s)Me - F - Me - F - Me - F - F - Me - Me -
Me - Me - F - Me - F - Me - Me - Me - Me -
Me(s)Me(s)Me
Or
Modification pattern 2:
Second strand (5′-3′):
ia - ia - Me(s)Me(s)Me - Me - Me - F - F - Me -
F - F - F - F - Me - Me - Me - Me - Me - Me - Me -
Me - Me,
First strand (5′-3′):
Me(s)F(s)Me - F - Me - F - Me - F - F - Me - Me -
Me - Me - F - Me - F - Me - Me - Me - Me -
Me(s)Me(s)Me
Or
Modification pattern 3:
Second strand (5′-3′):
ia - ia - Me(s)Me(s)Me - Me - Me - Me - F - Me -
F - F - F - F - Me - Me - Me - Me - Me - Me - Me -
Me - Me,
First strand (5′-3′):
Me(s)F(s)Me - F - Me - F - Me - F - F - Me - Me -
Me - Me - F - Me - F - Me - Me - Me - Me -
Me(s)Me(s)Me
Or
Modification pattern 4:
Second strand (5′-3′):
ia - ia - Me(s)Me(s)Me - Me - Me - Me - F - Me -
F - F - F - F - Me - Me - Me - Me - Me - Me - Me -
Me - Me,
First strand (5′-3′):
Me(s)F(s)Me - F - Me - F - Me - Me - Me - Me -
Me - Me - Me - F - Me - F - Me - Me - Me -
Me - Me(s)Me(s)Me
Or
Modification pattern 5:
Second strand (5′-3′):
ia - ia - Me(s)Me(s)Me - Me - Me - Me - Me - Me -
F - F - F - Me - Me - Me - Me - Me - Me - Me -
Me - Me - Me,
First strand (5′-3′):
Me(s)F(s)Me - Me - Me - F - Me - Me - F - Me -
Me - Me - Me - F - Me - F - Me - Me - Me -
Me - Me(s)Me(s)Me
Or
Modification pattern 6:
Second strand (5′-3′):
ia - ia - Me(s)Me(s)Me - Me - Me - Me - F - Me -
F - F - F - Me - Me - Me - Me - Me - Me - Me -
Me - Me - Me,
First strand (5′-3′):
Me(s)F(s)Me - Me - Me - F - Me - Me - F - Me -
Me - Me - Me - F - Me - F - Me - Me - Me - Me -
Me(s)Me(s)Me

wherein:
[0321] (s) is a phosphorothioate internucleoside linkage, ia represents an inverted abasic nucleoside.

[0322] A nucleic acid wherein modified nucleosides comprise any one of the following modification patterns:

Modification pattern 1:
Second strand (5′-3′):
Me - Me - Me - Me - Me - Me - F - F - F - F - F -
Me - Me - Me - Me - Me - Me - Me - F(s)Me(s)Me -
ia - ia,
First strand (5′-3′):
Me(s)F(s)Me - F - Me - F - Me - F - F - Me - Me -
Me - Me - F - Me - F - Me - Me - Me - Me -
Me(s)Me(s)Me
Or
Modification pattern 2:
Second strand (5′-3′):
Me - Me - Me - Me - Me - F - F - Me - F - F - F -
F - Me - Me - Me - Me - Me - Me - Me(s)Me(s)Me -
ia - ia,
First strand (5′-3′):
Me(s)F(s)Me - F - Me - F - Me - F - F - Me - Me -
Me - Me - F - Me - F - Me - Me - Me - Me -
Me(s)Me(s)Me
Or
Modification pattern 3:
Second strand (5′-3′):
Me - Me - Me - Me - Me - Me - F - Me - F - F - F -
F - Me - Me - Me - Me - Me - Me - Me(s)Me(s)Me -
a - ia,
First strand (5′-3′):
Me(s)F(s)Me - F - Me - F - Me - F - F - Me - Me -
Me - Me - F - Me - F - Me - Me - Me - Me -
Me(s)Me(s)Me
Or
Modification pattern 4:
Second strand (5′-3′):
Me - Me - Me - Me - Me - Me - F - Me - F - F - F -
F - Me - Me - Me - Me - Me - Me - Me(s)Me(s)Me -
ia - ia,
First strand (5′-3′):
Me(s)F(s)Me - F - Me - F - Me - Me - Me - Me -
Me - Me - Me - F - Me - F - Me - Me - Me - Me -
Me(s)Me(s)Me
Or
Modification pattern 5:
Second strand (5′-3′):
Me - Me - Me - Me - Me - Me - Me - Me - F - F -
F - Me - Me - Me - Me - Me - Me - Me -
Me(s)Me(s)Me - ia - ia,
First strand (5′-3′):
Me(s)F(s)Me - Me - Me - F - Me - Me - F - Me -
Me - Me - Me - F - Me - F - Me - Me - Me - Me -
Me(s)Me(s)Me
Or
Modification pattern 6:
Second strand (5′-3′):
Me - Me - Me - Me - Me - Me - F - Me - F - F - F -
Me - Me - Me - Me - Me - Me - Me - Me(s)Me(s)Me -
ia - ia,
First strand (5′-3′):
Me(s)F(s)Me - Me - Me - F - Me - Me - F - Me -
Me - Me - Me - F - Me - F - Me - Me - Me - Me -
Me(s)Me(s)Me

wherein: (s) is a phosphorothioate internucleoside linkage, ia represents an inverted abasic nucleoside, and when the inverted abasic nucleosides as represented by ia-ia are present at the 3′ terminus of the second strand, said inverted abasic nucleosides are present in a 2 nucleoside overhang.

[0323] A nucleic acid wherein the first strand comprises a 2′ sugar modification pattern wherein said modifications are selected at least from 2′Me and 2′F sugar modifications, provided that the overall number of 2′F sugar modifications in the first strand does not consist of four, or six, 2′F modifications.

[0324] A nucleic acid wherein the first strand comprises a 2′ sugar modification pattern wherein said modifications are selected at least from 2′Me and 2′F sugar modifications, wherein the overall number of 2′F sugar modifications in the first strand consists of three, five or seven 2′F modifications.

[0325] A nucleic acid wherein the first strand comprises a 2′ sugar modification pattern wherein said modifications are selected at least from 2′Me and 2′F sugar modifications, wherein the overall number of 2′F sugar modifications in the first strand consists of three 2′F modifications.

[0326] A nucleic acid wherein the first strand comprises a 2′ sugar modification pattern wherein said modifications are selected at least from 2′Me and 2′F sugar modifications, wherein the overall number of 2′F sugar modifications in the first strand consists of five 2′F modifications.

[0327] A nucleic acid wherein the first strand comprises a 2′ sugar modification pattern as follows (5′-3′):

Me - F - Me - X₂ - Me - F - (Me)₇ - (F - Me)₂ -
X₃ - Me - X₄ - (Me)₃

wherein X₂, X₃ and X₄ are selected from 2′Me and 2′F sugar modifications, provided that for X₂, X₃ and X₄ at least one is a 2′F sugar modification, and the other two sugar modifications are 2′Me sugar modifications.

[0328] A nucleic acid wherein the first strand comprises a 2′ sugar modification pattern as follows (5′-3′):

Me - F - Me - X₂ - Me - F - (Me)₇ - (F - Me)₂ -
X₃ - Me - X₄ - (Me)₃

wherein X₂ is a 2′F sugar modification, and X₃ and X₄ are 2′Me sugar modifications.

[0329] A nucleic acid wherein the first strand comprises a 2′ sugar modification pattern as follows (5′-3′):

Me-F-Me-X₂-Me-F-(Me)₇-(F-Me)₂-X₃-Me-X₄-(Me)₃

wherein X₃ is a 2′F sugar modification, and X₂ and X₄ are 2′Me sugar modifications.

[0330] A nucleic acid wherein the first strand comprises a 2′ sugar modification pattern as follows (5′-3′):

Me-F-Me-X₂-Me-F-(Me)₇-(F-Me)₂-X₃-Me-X₄-(Me)₃

wherein X₄ is a 2′F sugar modification, and X₂ and X₃ are 2′Me sugar modifications.

[0331] A nucleic acid wherein the first strand comprises a 2′ sugar modification pattern wherein said modifications are selected at least from 2′Me and 2′F sugar modifications, wherein the overall number of 2′F sugar modifications in the first strand consists of seven 2′F modifications.

[0332] A nucleic acid wherein the first strand comprises a 2′ sugar modification pattern as follows (5′-3′):

Me-F-Me-X₂-Me-F-Me-(F)₂-(Me)₄-(F-Me)₂-X₃-Me-X₄-(Me)3

wherein X₂, X₃ and X₄ are selected from 2′Me and 2′F sugar modifications, provided that for X₂, X₃ and X₄ at least one is a 2′F sugar modification, and the other two sugar modifications are 2′Me sugar modifications.

[0333] A nucleic acid wherein the first strand comprises a 2′ sugar modification pattern as follows (5′-3′):

Me-F-Me-X₂-Me-F-Me-(F)₂-(Me)₄-(F-Me)₂-X₃-Me-X₄-(Me)₃

wherein X₂ is a 2′F sugar modification, and X₃ and X₄ are 2′Me sugar modifications.

[0334] A nucleic acid wherein the first strand comprises a 2′ sugar modification pattern as follows (5′-3′):

Me-F-Me-X₂-Me-F-Me-(F)₂-(Me)₄-(F-Me)₂-X₃-Me-X₄-(Me)₃

wherein X₃ is a 2′F sugar modification, and X₂ and X₄ are 2′Me sugar modifications.

[0335] A nucleic acid wherein the first strand comprises a 2′ sugar modification pattern as follows (5′-3′):

Me-F-Me-X₂-Me-F-Me-(F)₂-(Me)₄-(F-Me)₂-X₃-Me-X₄-(Me)₃

wherein X₄ is a 2′F sugar modification, and X₂ and X₃ are 2′Me sugar modifications.

[0336] A nucleic acid wherein the first strand comprises a 2′ sugar modification pattern as follows (5′-3′):

Me-F-(Me)₃-X₁-(Me)₇-F-Me-F-(Me)₇

wherein X₁ is a thermally destabilising modification.

[0337] A nucleic acid wherein the first strand comprises a 2′ sugar modification pattern as follows (5′-3′):

Me-F-(Me)₃-X₁-Me-(F)₂-(Me)₄-F-Me-F-(Me)₇

wherein X₁ is a thermally destabilising modification.

[0338] A nucleic acid wherein the second strand comprises a 2′ sugar modification pattern as follows (5′-3′):

(Me)₈-(F)₃-(Me)₁₀.

[0339] A nucleic acid wherein the second strand comprises a 2′ sugar modification pattern as follows (5′-3′):

(Me)₈-(F)₃-(Me)₁₀, and

wherein the first strand comprises a 2′ sugar modification pattern wherein said modifications are selected at least from 2′Me and 2′F sugar modifications, provided that the overall number of 2′F sugar modifications in the first strand does not consist of four, or six, 2′F modifications.

[0340] A nucleic acid wherein the second strand comprises a 2′ sugar modification pattern as follows (5′-3′):

(Me)₈-(F)₃-(Me)₁₀, and

wherein the first strand comprises a 2′ sugar modification pattern wherein said modifications are selected at least from 2′Me and 2′F sugar modifications, wherein the overall number of 2′F sugar modifications in the first strand consists of three, five or seven 2′F modifications.

[0341] A nucleic acid comprising a first strand that is at least partially complementary to a portion of RNA transcribed from the target gene, and a second strand that is at least partially complementary to the first strand, wherein said first and second strands form a duplex region of at least 17 nucleosides in length, and wherein nucleosides of said second strand comprise a 2′ sugar modification pattern as follows (5′-3′):

(Me)₈-(F)₃-(Me)₁₀, and

wherein nucleosides of said first strand comprise a 2′ sugar modification pattern as follows (5′-3′):

Me-F-(Me)₃-X₁-(Me)₇-F-Me-F-(Me)₇,

wherein X₁ is a thermally destabilising modification.

[0342] A nucleic acid comprising a first strand that is at least partially complementary to a portion of RNA transcribed from the target gene, and a second strand that is at least partially complementary to the first strand, wherein said first and second strands form a duplex region of at least 17 nucleosides in length, and wherein nucleosides of said second strand comprise a 2′ sugar modification pattern as follows (5′-3′):

(Me)₈-(F)₃-(Me)₁₀, and

wherein nucleosides of said first strand comprise a 2′ sugar modification pattern as follows (5′-3′):

(Me-F)₃-(Me)₇-F-Me-F-(Me)₇.

[0343] A nucleic acid comprising a first strand that is at least partially complementary to a portion of RNA transcribed from the target gene, and a second strand that is at least partially complementary to the first strand, wherein said first and second strands form a duplex region of at least 17 nucleosides in length, and wherein nucleosides of said second strand comprise a 2′ sugar modification pattern as follows (5′-3′):

(Me)₈-(F)₃-(Me)₁₀, and

wherein nucleosides of said first strand comprise a 2′ sugar modification pattern as follows (5′-3′):

Me-F-(Me)₃-F-(Me)₇-(F-Me)₂-F-(Me)₅.

[0344] A nucleic acid comprising a first strand that is at least partially complementary to a portion of RNA transcribed from the target gene, and a second strand that is at least partially complementary to the first strand, wherein said first and second strands form a duplex region of at least 17 nucleosides in length, and wherein nucleosides of said second strand comprise a 2′ sugar modification pattern as follows (5′-3′):

(Me)₈-(F)₃-(Me)₁₀, and

wherein nucleosides of said first strand comprise a 2′ sugar modification pattern as follows (5′-3′):

Me-F-(Me)₃-F-(Me)₇-F-Me-F-(Me)₃-F-(Me)₃.

[0345] A nucleic acid comprising a first strand that is at least partially complementary to a portion of RNA transcribed from the target gene, and a second strand that is at least partially complementary to the first strand, wherein said first and second strands form a duplex region of at least 17 nucleosides in length, and wherein nucleosides of said second strand comprise a 2′ sugar modification pattern as follows (5′-3′):

(Me)₈-(F)₃-(Me)₁₀, and

wherein nucleosides of said first strand comprise a 2′ sugar modification pattern as follows (5′-3′):

Me-F-(Me)₃-X₁-Me-(F)₂-(Me)₄-F-Me-F-(Me)₇,

wherein X₁ is a thermally destabilising modification.

[0346] A nucleic acid comprising a first strand that is at least partially complementary to a portion of RNA transcribed from the target gene, and a second strand that is at least partially complementary to the first strand, wherein said first and second strands form a duplex region of at least 17 nucleosides in length, and wherein nucleosides of said second strand comprise a 2′ sugar modification pattern as follows (5′-3′):

(Me)₈-(F)₃-(Me)₁₀, and

wherein nucleosides of said first strand comprise a 2′ sugar modification pattern as follows (5′-3′):

(Me-F)₃-Me-(F)₂-(Me)₄-(F-Me)₂-(Me)₆.

[0347] A nucleic acid comprising a first strand that is at least partially complementary to a portion of RNA transcribed from the target gene, and a second strand that is at least partially complementary to the first strand, wherein said first and second strands form a duplex region of at least 17 nucleosides in length, and wherein nucleosides of said second strand comprise a 2′ sugar modification pattern as follows (5′-3′):

(Me)₈-(F)₃-(Me)₁₀, and

wherein nucleosides of said first strand comprise a 2′ sugar modification pattern as follows (5′-3′):

Me-F-(Me)₃-F-Me-(F)₂-(Me)₄-(F-Me)₂-F-(Me)₅.

[0348] A nucleic acid comprising a first strand that is at least partially complementary to a portion of RNA transcribed from the target gene, and a second strand that is at least partially complementary to the first strand, wherein said first and second strands form a duplex region of at least 17 nucleosides in length, and wherein nucleosides of said second strand comprise a 2′ sugar modification pattern as follows (5′-3′):

(Me)₈-(F)₃-(Me)₁₀, and

wherein nucleosides of said first strand comprise a 2′ sugar modification pattern as follows (5′-3′):

Me-F-(Me)₃-F-Me-(F)₂-(Me)₄-(F-Me)₂-(Me)₂-F-(Me)₃.

[0349] A nucleic acid wherein the second strand comprises a 2′ sugar, and abasic modification pattern as follows (5′-3′):

ia-ia-(Me)₈-(F)₃-(Me)₁₀

wherein ia represents an inverted abasic nucleoside.

[0350] A nucleic acid wherein the second strand comprises a 2′ sugar, and abasic modification pattern as follows (5′-3′):

ia-ia-(Me)₈-(F)₃-(Me)₁₀,

wherein ia represents an inverted abasic nucleoside; and wherein the first strand comprises a 2′ sugar modification pattern wherein said modifications are selected at least from 2′Me and 2′F sugar modifications, provided that the overall number of 2′F sugar modifications in the first strand does not consist of four, or six, 2′F modifications.

[0351] A nucleic acid wherein the second strand comprises a 2′ sugar, and abasic modification pattern as follows (5′-3′):

ia-ia-(Me)₈-(F)₃-(Me)₁₀,
[0352] wherein ia represents an inverted abasic nucleoside; and
[0353] wherein the first strand comprises a 2′ sugar modification pattern wherein said modifications are selected at least from 2′Me and 2′F sugar modifications, wherein the overall number of 2′F sugar modifications in the first strand consists of three, five or seven 2′F modifications.

[0354] A nucleic acid comprising a first strand that is at least partially complementary to a portion of RNA transcribed from the target gene, and a second strand that is at least partially complementary to the first strand, wherein said first and second strands form a duplex region of at least 17 nucleosides in length, and wherein nucleosides of said second strand comprise a 2′ sugar, and abasic modification pattern as follows (5′-3′):

ia-ia-(Me)₈-(F)₃-(Me)₁₀,
[0355] wherein ia represents an inverted abasic nucleoside; and
[0356] wherein nucleosides of said first strand comprise a 2′ sugar modification pattern as follows (5′-3′):

Me-F-(Me)₃-X₁-(Me)₇-F-Me-F-(Me)₇,

wherein X₁ is a thermally destabilising modification.

[0357] A nucleic acid comprising a first strand that is at least partially complementary to a portion of RNA transcribed from the target gene, and a second strand that is at least partially complementary to the first strand, wherein said first and second strands form a duplex region of at least 17 nucleosides in length, and wherein nucleosides of said second strand comprise a 2′ sugar, and abasic modification pattern as follows (5′-3′):

ia-ia-(Me)₈-(F)₃-(Me)₁₀,
[0358] wherein ia represents an inverted abasic nucleoside; and
[0359] wherein nucleosides of said first strand comprise a 2′ sugar modification pattern as follows (5′-3′):

(Me-F)₃-(Me)₇-F-Me-F-(Me)₇.

[0360] A nucleic acid comprising a first strand that is at least partially complementary to a portion of RNA transcribed from the target gene, and a second strand that is at least partially complementary to the first strand, wherein said first and second strands form a duplex region of at least 17 nucleosides in length, and wherein nucleosides of said second strand comprise a 2′ sugar, and abasic modification pattern as follows (5′-3′):

ia-ia-(Me)₈-(F)₃-(Me)₁₀,
[0361] wherein ia represents an inverted abasic nucleoside; and
[0362] wherein nucleosides of said first strand comprise a 2′ sugar modification pattern as follows (5′-3′):

Me-F-(Me)₃-F-(Me)₇-(F-Me)₂-F-(Me)₅.

[0363] A nucleic acid comprising a first strand that is at least partially complementary to a portion of RNA transcribed from the target gene, and a second strand that is at least partially complementary to the first strand, wherein said first and second strands form a duplex region of at least 17 nucleosides in length, and wherein nucleosides of said second strand comprise a 2′ sugar, and abasic modification pattern as follows (5′-3′):

ia-ia-(Me)₈-(F)₃-(Me)₁₀,
[0364] wherein ia represents an inverted abasic nucleoside; and
[0365] wherein nucleosides of said first strand comprise a 2′ sugar modification pattern as follows (5′-3′):

Me-F-(Me)₃-F-(Me)₇-F-Me-F-(Me)₃-F-(Me)₃.

[0366] A nucleic acid comprising a first strand that is at least partially complementary to a portion of RNA transcribed from the target gene, and a second strand that is at least partially complementary to the first strand, wherein said first and second strands form a duplex region of at least 17 nucleosides in length, and wherein nucleosides of said second strand comprise a 2′ sugar, and abasic modification pattern as follows (5′-3′):

ia-ia-(Me)₈-(F)₃-(Me)₁₀,
[0367] wherein ia represents an inverted abasic nucleoside; and
[0368] wherein nucleosides of said first strand comprise a 2′ sugar modification pattern as follows (5′-3′):

Me-F-(Me)₃-X₁-Me-(F)₂-(Me)₄-F-Me-F-(Me)₇,

wherein X₁ is a thermally destabilising modification.

[0369] A nucleic acid comprising a first strand that is at least partially complementary to a portion of RNA transcribed from the target gene, and a second strand that is at least partially complementary to the first strand, wherein said first and second strands form a duplex region of at least 17 nucleosides in length, and wherein nucleosides of said second strand comprise a 2′ sugar, and abasic modification pattern as follows (5′-3′):

ia-ia-(Me)₈-(F)₃-(Me)₁₀,
[0370] wherein ia represents an inverted abasic nucleoside; and
[0371] wherein nucleosides of said first strand comprise a 2′ sugar modification pattern as follows (5′-3′):

(Me-F)₃-Me-(F)₂-(Me)₄-(F-Me)₂-(Me)₆.

[0372] A nucleic acid comprising a first strand that is at least partially complementary to a portion of RNA transcribed from the target gene, and a second strand that is at least partially complementary to the first strand, wherein said first and second strands form a duplex region of at least 17 nucleosides in length, and wherein nucleosides of said second strand comprise a 2′ sugar, and abasic modification pattern as follows (5′-3′):

ia-ia-(Me)₈-(F)₃-(Me)₁₀,
[0373] wherein ia represents an inverted abasic nucleoside; and
[0374] wherein nucleosides of said first strand comprise a 2′ sugar modification pattern as follows (5′-3′):

Me-F-(Me)₃-F-Me-(F)₂-(Me)₄-(F-Me)₂-F-(Me)₅.

[0375] A nucleic acid comprising a first strand that is at least partially complementary to a portion of RNA transcribed from the target gene, and a second strand that is at least partially complementary to the first strand, wherein said first and second strands form a duplex region of at least 17 nucleosides in length, and wherein nucleosides of said second strand comprise a 2′ sugar, and abasic modification pattern as follows (5′-3′):

ia-ia-(Me)₈-(F)₃-(Me)₁₀,
[0376] wherein ia represents an inverted abasic nucleoside; and
[0377] wherein nucleosides of said first strand comprise a 2′ sugar modification pattern as follows (5′-3′):

Me-F-(Me)₃-F-Me-(F)₂-(Me)₄-(F-Me)₂-(Me)₂-F-(Me)₃.

[0378] A nucleic acid wherein the second strand comprises a 2′ sugar modification pattern as follows (5′-3′):

ia-ia-Me(s)Me(s)(Me)₆-(F)₃-(Me)₁₀,

wherein ia represents an inverted abasic nucleoside, and (s) represents a phosphorothioate linkage.

[0379] A nucleic acid wherein the second strand comprises a 2′ sugar modification pattern as follows (5′-3′):

ia-ia-Me(s)Me(s)(Me)₆-(F)₃-(Me)₁₀,
[0380] wherein ia represents an inverted abasic nucleoside, and
[0381] (s) represents a phosphorothioate linkage; and
[0382] wherein the first strand comprises a 2′ sugar modification pattern wherein said modifications are selected at least from 2′Me and 2′F sugar modifications, provided that the overall number of 2′F sugar modifications in the first strand does not consist of four, or six, 2′F modifications.

[0383] A nucleic acid wherein the second strand comprises a 2′ sugar modification pattern as follows (5′-3′):

ia-ia-Me(s)Me(s)(Me)₆-(F)₃-(Me)₁₀,
[0384] wherein ia represents an inverted abasic nucleoside, and
[0385] (s) represents a phosphorothioate linkage; and
[0386] wherein the first strand comprises a 2′ sugar modification pattern wherein said modifications are selected at least from 2′Me and 2′F sugar modifications, wherein the overall number of 2′F sugar modifications in the first strand consists of three, five or seven 2′F modifications.

[0387] A nucleic acid comprising a first strand that is at least partially complementary to a portion of RNA transcribed from the target gene, and a second strand that is at least partially complementary to the first strand, wherein said first and second strands form a duplex region of at least 17 nucleosides in length, and wherein nucleosides of said second strand comprise a 2′ sugar, and abasic modification pattern as follows (5′-3′):

ia-ia-Me(s)Me(s)(Me)₆-(F)₃-(Me)₁₀,
[0388] wherein ia represents an inverted abasic nucleoside, and
[0389] (s) represents a phosphorothioate linkage, and
[0390] wherein nucleosides of said first strand comprise a 2′ sugar modification pattern as follows (5′-3′):

Me(s)F(s)(Me)₃-X₁-(Me)₇-F-Me-F-(Me)₅(s)Me(s)Me,
[0391] wherein X₁ is a thermally
[0392] destabilising modification.

[0393] A nucleic acid comprising a first strand that is at least partially complementary to a portion of RNA transcribed from the target gene, and a second strand that is at least partially complementary to the first strand, wherein said first and second strands form a duplex region of at least 17 nucleosides in length, and wherein nucleosides of said second strand comprise a 2′ sugar, and abasic modification pattern as follows (5′-3′):

ia-ia-Me(s)Me(s)(Me)₆-(F)₃-(Me)₁₀,
[0394] wherein ia represents an inverted abasic nucleoside, and
[0395] (s) represents a phosphorothioate linkage, and
[0396] wherein nucleosides of said first strand comprise a 2′ sugar modification pattern as follows (5′-3′):

Me(s)F(s)Me-F-Me-F-(Me)₇-F-Me-F-(Me)₅(s)Me(s)Me.

[0397] A nucleic acid comprising a first strand that is at least partially complementary to a portion of RNA transcribed from the target gene, and a second strand that is at least partially complementary to the first strand, wherein said first and second strands form a duplex region of at least 17 nucleosides in length, and wherein nucleosides of said second strand comprise a 2′ sugar, and abasic modification pattern as follows (5′-3′):

ia-ia-Me(s)Me(s)(Me)₆-(F)₃-(Me)₁₀,
[0398] wherein ia represents an inverted abasic nucleoside, and
[0399] (s) represents a phosphorothioate linkage, and
[0400] wherein nucleosides of said first strand comprise a 2′ sugar modification pattern as follows (5′-3′):

Me(s)F(s)(Me)₃-F-(Me)₇-(F-Me)₂-F-(Me)₃(s)Me(s)Me.

[0401] A nucleic acid comprising a first strand that is at least partially complementary to a portion of RNA transcribed from the target gene, and a second strand that is at least partially complementary to the first strand, wherein said first and second strands form a duplex region of at least 17 nucleosides in length, and wherein nucleosides of said second strand comprise a 2′ sugar, and abasic modification pattern as follows (5′-3′):

ia-ia-Me(s)Me(s)(Me)₆-(F)₃-(Me)₁₀,
[0402] wherein ia represents an inverted abasic nucleoside, and
[0403] (s) represents a phosphorothioate linkage, and
[0404] wherein nucleosides of said first strand comprise a 2′ sugar modification pattern as follows (5′-3′):

Me(s)F(s)(Me)₃-F-(Me)₇-F-Me-F-(Me)₃-F-Me(s)Me(s)Me.

[0405] A nucleic acid comprising a first strand that is at least partially complementary to a portion of RNA transcribed from the target gene, and a second strand that is at least partially complementary to the first strand, wherein said first and second strands form a duplex region of at least 17 nucleosides in length, and wherein nucleosides of said second strand comprise a 2′ sugar, and abasic modification pattern as follows (5′-3′):

ia-ia-Me(s)Me(s)(Me)₆-(F)₃-(Me)₁₀,
[0406] wherein ia represents an inverted abasic nucleoside, and
[0407] (s) represents a phosphorothioate linkage, and
[0408] wherein nucleosides of said first strand comprise a 2′ sugar modification pattern as follows (5′-3′):

Me(s)F(s)(Me)₃-X₁-Me-(F)₂-(Me)₄-F-Me-F-(Me)₅(s)Me(s)Me,

wherein X₁ is a thermally destabilising modification.

[0409] A nucleic acid comprising a first strand that is at least partially complementary to a portion of RNA transcribed from the target gene, and a second strand that is at least partially complementary to the first strand, wherein said first and second strands form a duplex region of at least 17 nucleosides in length, and wherein nucleosides of said second strand comprise a 2′ sugar, and abasic modification pattern as follows (5′-3′):

ia-ia-Me(s)Me(s)(Me)₆-(F)₃-(Me)₁₀,
[0410] wherein ia represents an inverted abasic nucleoside, and
[0411] (s) represents a phosphorothioate linkage, and
[0412] wherein nucleosides of said first strand comprise a 2′ sugar modification pattern as follows (5′-3′):

Me(s)F(s)Me-F-Me-F-Me-(F)₂-(Me)₄-(F-Me)₂-(Me)₄(s)Me
(s)Me.

[0413] A nucleic acid comprising a first strand that is at least partially complementary to a portion of RNA transcribed from the target gene, and a second strand that is at least partially complementary to the first strand, wherein said first and second strands form a duplex region of at least 17 nucleosides in length, and wherein nucleosides of said second strand comprise a 2′ sugar, and abasic modification pattern as follows (5′-3′):

ia-ia-Me(s)Me(s)(Me)₆-(F)₃-(Me)₁₀,
[0414] wherein ia represents an inverted abasic nucleoside, and
[0415] (s) represents a phosphorothioate linkage, and
[0416] wherein nucleosides of said first strand comprise a 2′ sugar modification pattern as follows (5′-3′):

Me(s)F(s)(Me)₃-F-Me-(F)₂-(Me)₄-(F-Me)₂-F-(Me)₃(s)Me
(s)Me.

[0417] A nucleic acid comprising a first strand that is at least partially complementary to a portion of RNA transcribed from the target gene, and a second strand that is at least partially complementary to the first strand, wherein said first and second strands form a duplex region of at least 17 nucleosides in length, and wherein nucleosides of said second strand comprise a 2′ sugar, and abasic modification pattern as follows (5′-3′):

ia-ia-Me(s)Me(s)(Me)₆-(F)₃-(Me)₁₀,
[0418] wherein ia represents an inverted abasic nucleoside, and
[0419] (s) represents a phosphorothioate linkage, and
[0420] wherein nucleosides of said first strand comprise a 2′ sugar modification pattern as follows (5′-3′):

Me(s)F(s)(Me)₃-F-Me-(F)₂-(Me)₄-(F-Me)₂-(Me)₂-F-Me
(s)Me(s)Me.

[0421] Preferred modifications are as follows:

Modification pattern 1:
Second strand (5′-3′):
ia-ia-Me-Me-Me-Me-Me-Me-Me-Me-F-F-F-Me-
Me-Me-Me-Me-Me-Me-Me-Me-Me,
First strand (5′-3′):
Me-F-Me-Me-Me-X₁-Me-Me-Me-Me-Me-Me-Me-F-
Me-F-Me-Me-Me-Me-Me-Me-Me, wherein X₁ is a thermally destabilising
modification;
Or
Modification pattern 2:
Second strand (5′-3′):
ia-ia-Me-Me-Me-Me-Me-Me-Me-Me-F-F-F-Me-
Me-Me-Me-Me-Me-Me-Me-Me-Me,
First strand (5′-3′):
Me-F-Me-F-Me-F-Me-Me-Me-Me-Me-Me-Me-F-Me-
F-Me-Me-Me-Me-Me-Me-Me,
Or
Modification pattern 3:
Second strand (5′-3′):
ia-ia-Me-Me-Me-Me-Me-Me-Me-Me-F-F-F-Me-
Me-Me-Me-Me-Me-Me-Me-Me-Me,
First strand (5′-3′): M-F-Me-Me-Me-F-Me-Me-Me-Me-Me-Me-Me-F-
Me-F-Me-F-Me-Me-Me-Me-Me;
Or
Modification pattern 4:
Second strand (5′-3′):
ia-ia-Me-Me-Me-Me-Me-Me-Me-Me-F-F-F-Me-
Me-Me-Me-Me-Me-Me-Me-Me-Me,
First strand (5′-3′):
Me-F-Me-Me-Me-F-Me-Me-Me-Me-Me-Me-Me-F-
Me-F-Me-Me-Me-F-Me-Me-Me;
Or
Modification pattern 5:
Second strand (5′-3′):
ia-ia-Me-Me-Me-Me-Me-Me-Me-Me-F-F-F-Me-
Me-Me-Me-Me-Me-Me-Me-Me-Me,
First strand (5′-3′):
Me-F-Me-Me-Me-X₁-Me-F-F-Me-Me-Me-Me-F-Me-
F-Me-Me-Me-Me-Me-Me-Me, wherein X₁ is a thermally destabilising
modification;
Or
Modification pattern 6:
Second strand (5′-3′):
ia-ia-Me-Me-Me-Me-Me-Me-Me-Me-F-F-F-Me-
Me-Me-Me-Me-Me-Me-Me-Me-Me,
First strand (5′-3′):
Me-F-Me-F-Me-F-Me-F-F-Me-Me-Me-Me-F-Me-F-
Me-Me-Me-Me-Me-Me-Me;
Or
Modification pattern 7:
Second strand (5′-3′):
ia-ia-Me-Me-Me-Me-Me-Me-Me-Me-F-F-F-Me-
Me-Me-Me-Me-Me-Me-Me-Me-Me,
First strand (5′-3′):
Me-F-Me-Me-Me-F-Me-F-F-Me-Me-Me-Me-F-Me-
F-Me-F-Me-Me-Me-Me-Me;
Or
Modification pattern 8:
Second strand (5′-3′):
ia-ia-Me-Me-Me-Me-Me-Me-Me-Me-F-F-F-Me-
Me-Me-Me-Me-Me-Me-Me-Me-Me,
First strand (5′-3′):
Me-F-Me-Me-Me-F-Me-F-F-Me-Me-Me-Me-F-Me-
F-Me-Me-Me-F-Me-Me-Me.
Particularly preferred modifications are as follows:
Modification pattern 1:
Second strand (5′-3′):
ia-ia-Me(s)Me(s)Me-Me-Me-Me-Me-Me-F-F-F-Me-
Me-Me-Me-Me-Me-Me-Me-Me-Me,
First strand (5′-3′):
Me(s)F(s)Me-Me-Me-X₁-Me-Me-Me-Me-Me-Me-Me-F-
Me-F-Me-Me-Me-Me-Me(s)Me(s)Me, wherein X₁ is a thermally destabilising
modification;
Or
Modification pattern 2:
Second strand (5′-3′):
ia-ia-Me(s)Me(s)Me-Me-Me-Me-Me-Me-F-F-F-Me-
Me-Me-Me-Me-Me-Me-Me-Me-Me,
First strand (5′-3′):
Me(s)F(s)Me-F-Me-F-Me-Me-Me-Me-Me-Me-Me-F-
Me-F-Me-Me-Me-Me-Me(s)Me(s)Me;
Or
Modification pattern 3:
Second strand (5′-3′):
ia-ia-Me(s)Me(s)Me-Me-Me-Me-Me-Me-F-F-F-Me-
Me-Me-Me-Me-Me-Me-Me-Me-Me,
First strand (5′-3′):
Me(s)F(s)Me-Me-Me-F-Me-Me-Me-Me-Me-Me-Me-F-
Me-F-Me-F-Me-Me-Me(s)Me(s)Me;
Or
Modification pattern 4:
Second strand (5′-3′):
ia-ia-Me(s)Me(s)Me-Me-Me-Me-Me-Me-F-F-F-Me-
Me-Me-Me-Me-Me-Me-Me-Me-Me,
First strand (5′-3′):
Me(s)F(s)Me-Me-Me-F-Me-Me-Me-Me-Me-Me-Me-F-
Me-F-Me-Me-Me-F-Me(s)Me(s)Me;
Or
Modification pattern 5:
Second strand (5′-3′):
ia-ia-Me(s)Me(s)Me-Me-Me-Me-Me-Me-F-F-F-Me-
Me-Me-Me-Me-Me-Me-Me-Me-Me,
First strand (5′-3′):
Me(s)F(s)Me-Me-Me-X₁-Me-F-F-Me-Me-Me-Me-F-Me-
F-Me-Me-Me-Me-Me(s)Me(s)Me, wherein X₁ is a thermally destabilising
modification;
Or
Modification pattern 6:
Second strand (5′-3′):
ia-ia-Me(s)Me(s)Me-Me-Me-Me-Me-Me-F-F-F-Me-
Me-Me-Me-Me-Me-Me-Me-Me-Me,
First strand (5′-3′):
Me(s)F(s)Me-F-Me-F-Me-F-F-Me-Me-Me-Me-F-Me-
F-Me-Me-Me-Me-Me(s)Me(s)Me;
Or
Modification pattern 7:
Second strand (5′-3′):
ia-ia-Me(s)Me(s)Me-Me-Me-Me-Me-Me-F-F-F-Me-
Me-Me-Me-Me-Me-Me-Me-Me-Me,
First strand (5′-3′):
Me(s)F(s)Me-Me-Me-F-Me-F-F-Me-Me-Me-Me-F-Me-
F-Me-F-Me-Me-Me(s)Me(s)Me;
Or
Modification pattern 8:
Second strand (5′-3′):
ia-ia-Me(s)Me(s)Me-Me-Me-Me-Me-Me-F-F-F-Me-
Me-Me-Me-Me-Me-Me-Me-Me-Me,
First strand (5′-3′):
Me(s)F(s)Me-Me-Me-F-Me-F-F-Me-Me-Me-Me-F-Me-
F-Me-Me-Me-F-Me(s)Me(s)Me;

wherein (s) is a phosphorothioate internucleoside linkage.

### Conjugation of Nucleic Acid to Ligand

[0422] Another modification of a nucleic acid e.g. RNA e.g. an siRNA of the invention involves linking the nucleic acid e.g. the siRNA to one or more ligand moieties e.g. to enhance the activity, cellular distribution, or cellular uptake of the nucleic acid e.g. siRNA e.g., into a cell.

[0423] In some embodiments, the ligand moiety described can be attached to a nucleic acid e.g. an siRNA oligonucleoside, via a linker that can be cleavable or non-cleavable. The term “linker” or “linking group” means an organic moiety that connects two parts of a compound, e.g., covalently attaches two parts of a compound.

[0424] The ligand can be attached to the 3′ or 5′ end of the sense strand.

[0425] The ligand is preferably conjugated to 3′ end of the sense strand of the nucleic acid e.g. an siRNA agent.

[0426] The invention therefore relates in a further aspect to a conjugate for inhibiting expression of a target e.g. a target gene, in a cell, said conjugate comprising a nucleic acid portion and one or more ligand moieties, said nucleic acid portion comprising a nucleic acid as disclosed herein.

[0427] In one aspect the second strand of the nucleic acid is conjugated directly or indirectly (e.g. via a linker) to the one or more ligand moiety(s), wherein said ligand moiety is typically present at a terminal region of the second strand, preferably at the 3′ terminal region thereof.

[0428] In certain embodiments, the ligand moiety comprises a GalNAc or GalNAc derivative attached to the nucleic acid e.g. dsiRNA through a linker.

[0429] Therefore, the invention relates to a conjugate wherein the ligand moiety comprises
[0430] i) one or more GalNAc ligands; and/or
[0431] ii) one or more GalNAc ligand derivatives; and/or
[0432] iii) one or more GalNAc ligands conjugated to said nucleic acid through a linker.

[0433] Said GalNAc ligand may be conjugated directly or indirectly to the 5′ or 3′ terminal region of the second strand of the nucleic acid, preferably at the 3′ terminal region thereof.

[0434] GalNAc ligands are well known in the art and described in, inter alia, EP3775207A1.

[0435] In some embodiments, the ligand moiety comprises one or more ligands.

[0436] In some embodiments, the ligand moiety comprises one or more carbohydrate ligands.

[0437] In some embodiments, the one or more carbohydrates can be a monosaccharide, disaccharide, trisaccharide, tetrasaccharide, oligosaccharide and/or polysaccharide.

[0438] In some embodiments, the one or more carbohydrates comprise one or more galactose moieties, one or more lactose moieties, one or more N-AcetylGalactosamine moieties, and/or one or more mannose moieties.

[0439] In some embodiments, the one or more carbohydrates comprise one or more N-Acetyl-Galactosamine moieties.

[0440] In some embodiments, the compounds as described anywhere herein comprise two or three N-AcetylGalactosamine moieties.

[0441] In some embodiments, the one or more ligands are attached in a linear configuration, or in a branched configuration, for example each configuration being respectively attached to a branch point in an overall linker.

[0442] Exemplary linear configurations and Exemplary branched configurations are shown in FIG. 1A-B:

[0443] In FIG. 1A, (linear), (a) and/or (b) can typically represent connecting bonds or groups, such as phosphate or phosphorothioate groups.

[0444] In FIG. 1B, (branched), in some embodiments, the one or more ligands are attached as a biantennary or triantennary branched configuration. Typically, a triantennary branched configuration can be preferred, such as an N-AcetylGalactosamine triantennary branched configuration.

### Linker

[0445] Exemplary compounds of the invention comprise a ‘linker moiety’, such as that as depicted in Formula (I), that is part of an overall ‘linker’.

[chemical structure]

[0446] wherein:
[0447] R₁ at each occurrence is independently selected from the group consisting of hydrogen, methyl and ethyl;
[0448] R₂ is selected from the group consisting of hydrogen, hydroxy, —OC₁₋₃alkyl, —C(═O)OC₁₋₃alkyl, halo and nitro;
[0449] X₁ and X₂ at each occurrence are independently selected from the group consisting of methylene, oxygen and sulfur;
[0450] m is an integer of from 1 to 6;
[0451] n is an integer of from 1 to 10;
[0452] q, r, s, t, v are independently integers from 0 to 4, with the proviso that:
[0453] (i) q and r cannot both be 0 at the same time; and
[0454] (ii) s, t and v cannot all be 0 at the same time;
[0455] Z is an oligonucleoside moiety.

[0456] As will be further understood in the art, exemplary compounds of the invention comprise an overall linker that is located between the oligonucleoside moiety and the ligand moiety of these compounds. The overall linker, thereby ‘links’ the oligonucleoside moiety and the ligand moiety to each other.

[0457] The overall linker is often notionally envisaged as comprising one or more linker building blocks. For example, there is a linker portion that is depicted as the ‘linker moiety’ as represented in Formula (I) positioned adjacent the ligand moiety and attaching the ligand moiety, typically via a branch point, directly or indirectly to the oligonucleoside moiety. The linker moiety as depicted in Formula (I) can also often be referred to as the ‘ligand arm or arms’ of the overall linker. There can also, but not always, be a further linker portion between the oligonucleoside moiety and the branch point, that is often referred to as the ‘tether moiety’ of the overall linker, ‘tethering’ the oligonucleoside moiety to the remainder of the conjugated compound. Such ‘ligand arms’ and/or ‘linker moieties’ and/or ‘tether moieties’ can be envisaged by reference to the linear and/or branched configurations as set out above.

[0458] As can be seen from the claims, and the reminder of the patent specification, the scope of the present invention extends to linear or branched configurations, and with no limitation as to the number of individual ligands that might be present. Furthermore, the addressee will also be aware that there are many structures that could be used as the linker moiety, based on the state of the art and the expertise of an oligonucleoside chemist.

[0459] The remainder of the overall linker (other than the linker moiety) as set out in the claims, and the remainder of the patent specification, is shown by its chemical constituents in Formula (I), which the inventors consider to be particularly unique to the current invention. In more general terms, however, these chemical constituents could be described as a ‘tether moiety’ as hereinbefore described, wherein the ‘tether moiety’ is that portion of the overall linker which comprises the group of atoms between Z, namely the oligonucleoside moiety, and the linker moiety as depicted in Formula (I).

### Tether Moiety of Formula I

[0460] In relation to Formula (I), the ‘tether moiety’ comprises the group of atoms between Z, namely the oligonucleoside moiety, and the linker moiety.

[0461] In some embodiments, R₁ is hydrogen at each occurrence. In some embodiments, R₁ is methyl. In some embodiments, R₁ is ethyl.

[0462] In some embodiments, R₂ is hydroxy. In some embodiments, R₂ is halo. In some embodiments, R₂ is fluoro. In some embodiments, R₂ is chloro. In some embodiments, R₂ is bromo. In some embodiments, R₂ is iodo. In some embodiments, R₂ is nitro.

[0463] In some embodiments, X₁ is methylene. In some embodiments, X₁ is oxygen. In some embodiments, X₁ is sulfur.

[0464] In some embodiments, X₂ is methylene. In some embodiments, X₂ is oxygen. In some embodiments, X₂ is sulfur.

[0465] In some embodiments, m=3.

[0466] In some embodiments, n=6.

[0467] In some embodiments, X₁ is oxygen and X₂ is methylene. In some embodiments, both X₁ and X₂ are methylene.

[0468] In some embodiments, q=1, r=2, s=1, t=1, v=1. In some embodiments, q=1, r=3, s=1, t=1, v=1.

[0469] In some embodiments, R₁ is hydrogen at each occurrence, n=6, m=3, R₂ is fluoro, X₂ is methylene, v=1, t=1, s=1, X₁ is methylene, q=1 and r=2.

[0470] Thus, in some embodiments, exemplary compounds of the invention comprise the following structure:

[chemical structure]

[0471] In some embodiments, R₁ is hydrogen at each occurrence, n=6, m=3, R₂ is fluoro, X₂ is methylene, v=1, t=1, s=1, X₁ is oxygen, q=1 and r=2.

[0472] Thus, in some embodiments, exemplary compounds of the invention comprise the following structure:

[chemical structure]

### Alternative Tether Moieties

[0473] During the synthesis of compounds of the present invention, alternative tether moiety structures may arise. In some embodiments, alternative tether moieties have a change of one or more atoms in the tether moiety of the overall linker compared to tether moieties described anywhere herein.

[0474] In some embodiments, the alternative tether moiety is a compound of Formula (I) as described anywhere herein, wherein R₂ is hydroxy.

[0475] In some embodiments, R₁ is hydrogen at each occurrence, n=6, m=3, R₂ is hydroxy, X₂ is methylene, v=1, t=1, s=1, X₁ is methylene, q=1 and r=2.

[0476] Thus, in some embodiments, compounds of the invention comprise the following structure:

[chemical structure]

[0477] In some embodiments, R₁ is hydrogen at each occurrence, n=6, m=3, R₂ is hydroxy, X₂ is methylene, v=1, t=1, s=1, X₁ is oxygen, q=1 and r=2.

[0478] Thus, in some embodiments, compounds of the invention comprise the following structure:

[chemical structure]

### Linker Moiety

[0479] In relation to Formula (I), the ‘linker moiety’ as depicted in Formula (I) comprises the group of atoms located between the tether moiety as described anywhere herein, and the ligand moiety as described anywhere herein.

[0480] In some embodiments:

[chemical structure]

[0481] as depicted in Formula (I) as described anywhere herein is any of Formulae (VIa), (VIb) or (VIc), preferably Formula (VIa):

[chemical structure]

[0482] wherein:
[0483] A₁ is hydrogen, or a suitable hydroxy protecting group;
[0484] a is an integer of 2 or 3; and
[0485] b is an integer of 2 to 5; or

[chemical structure]

[0486] wherein:
[0487] A₁ is hydrogen, or a suitable hydroxy protecting group;
[0488] a is an integer of 2 or 3; and
[0489] c and d are independently integers of 1 to 6; or

[chemical structure]

[0490] wherein:
[0491] A₁ is hydrogen, or a suitable hydroxy protecting group;
[0492] a is an integer of 2 or 3; and
[0493] e is an integer of 2 to 10.

[0494] In some embodiments, the moiety:

[chemical structure]

[0495] as depicted in Formula (I) is Formula (VIa):

[chemical structure]

[0496] wherein:
[0497] A₁ is hydrogen, or a suitable hydroxy protecting group;
[0498] a is 3; and
[0499] b is an integer of 3.

[0500] In some embodiments, the moiety:

[chemical structure]

[0501] as depicted in Formula (I) as described anywhere herein is Formula (VII):

[chemical structure]

[0502] wherein:
[0503] A₁ is hydrogen;
[0504] a is an integer of 2 or 3, preferably 3.

[0505] Other exemplary compounds of the invention comprise a ‘linker moiety’, as depicted in Formula (I*), that is part of an overall ‘linker’.

[chemical structure]

[0506] Where:
[0507] r and s are independently an integer selected from 1 to 16; and
[0508] Z is an oligonucleoside moiety.

[0509] As will be further understood in the art, exemplary compounds of the invention comprise an overall linker that is located between the oligonucleoside moiety and the ligand moiety of these compounds. The overall linker, thereby ‘links’ the oligonucleoside moiety and the ligand moiety to each other.

[0510] The overall linker is often notionally envisaged as comprising one or more linker building blocks. For example, there is a linker portion that is depicted as the ‘linker moiety’ as represented in Formula (I*) positioned adjacent the ligand moiety and attaching the ligand moiety, typically via a branch point, directly or indirectly to the oligonucleoside moiety. The linker moiety as depicted in Formula (I*) can also often be referred to as the ‘ligand arm or arms’ of the overall linker. There can also, but not always, be a further linker portion between the oligonucleoside moiety and the branch point, that is often referred to as the ‘tether moiety’ of the overall linker, ‘tethering’ the oligonucleoside moiety to the remainder of the conjugated compound. Such ‘ligand arms’ and/or ‘linker moieties’ and/or ‘tether moieties’ can be envisaged by reference to the linear and/or branched configurations as set out above.

[0511] As can be seen from the claims, and the reminder of the patent specification, the scope of the present invention extends to linear or branched configurations, and with no limitation as to the number of individual ligands that might be present. Furthermore, the addressee will also be aware that there are many structures that could be used as the linker moiety, based on the state of the art and the expertise of an oligonucleoside chemist.

[0512] The remainder of the overall linker (other than the linker moiety) as set out in the claims, and the remainder of the patent specification, is shown by its chemical constituents in Formula (I), which the inventors consider to be particularly unique to the current invention. In more general terms, however, these chemical constituents could be described as a ‘tether moiety’ as hereinbefore described, wherein the ‘tether moiety’ is that portion of the overall linker which comprises the group of atoms between Z, namely the oligonucleoside moiety, and the linker moiety as depicted in Formula (I).

### Tether Moiety

[0513] In relation to Formula (I*), the ‘tether moiety’ comprises the group of atoms between Z, namely the oligonucleoside moiety, and the linker moiety.

[0514] In some embodiments, s is an integer selected from 4 to 12. In some embodiments, s is 6.

[0515] In some embodiments, r is an integer selected from 4 to 14. In some embodiments, r is 6. In some embodiments, r is 12.

[0516] In some embodiments, r is 12 and s is 6.

[0517] Thus, in some embodiments, exemplary compounds of the invention comprise the following structure:

[chemical structure]

[0518] In some embodiments, r is 6 and s is 6.

[0519] Thus, in some embodiments, exemplary compounds of the invention comprise the following structure:

[chemical structure]

### Linker Moiety

[0520] In relation to Formula (I*), the ‘linker moiety’ as depicted in Formula (I) comprises the group of atoms located between the tether moiety as described anywhere herein, and the ligand moiety as described anywhere herein.

[0521] In some embodiments, the moiety:

[chemical structure]

[0522] as depicted in Formula (I*) as described anywhere herein is any of Formulae (IV*), (V*) or (VI*), preferably Formula (IV*):

[chemical structure]

[0523] wherein:
[0524] A₁ is hydrogen, or a suitable hydroxy protecting group;
[0525] a is an integer of 2 or 3; and
[0526] b is an integer of 2 to 5; or

[chemical structure]

[0527] wherein:
[0528] A₁ is hydrogen, or a suitable hydroxy protecting group;
[0529] a is an integer of 2 or 3; and
[0530] c and d are independently integers of 1 to 6; or

[chemical structure]

[0531] wherein:
[0532] A₁ is hydrogen, or a suitable hydroxy protecting group;
[0533] a is an integer of 2 or 3; and
[0534] e is an integer of 2 to 10.

[0535] In some embodiments, the moiety:

[chemical structure]

[0536] as depicted in Formula (I) is Formula (VIa*):

[chemical structure]

[0537] wherein:
[0538] A₁ is hydrogen, or a suitable hydroxy protecting group;
[0539] a is 3; and
[0540] b is an integer of 3.

[0541] In some embodiments, the moiety:

[chemical structure]

[0542] as depicted in Formula (I) as described anywhere herein is Formula (VII*):

[chemical structure]

[0543] wherein:
[0544] A₁ is hydrogen;
[0545] a is an integer of 2 or 3.

[0546] In some embodiments, a=2. In some embodiments, a=3. In some embodiments, b=3.

### Vector and Cell

[0547] In one aspect, the invention provides a cell containing a nucleic acid, such as inhibitory RNA [RNAi] as described herein.

[0548] In one aspect, the invention provides a cell comprising a vector as described herein.

[0549] In one aspect the invention provides a vector comprising an oligonucleotide inhibitor, e.g. an iRNA e.g. siRNA.

### Pharmaceutically Acceptable Compositions

[0550] In one aspect, the invention provides a pharmaceutical composition for inhibiting expression of a target gene, the composition comprising an inhibitor such as an oligomer such as a nucleic acid as disclosed herein.

[0551] The pharmaceutically acceptable composition may comprise an excipient and or carrier.

[0552] Some examples of materials which can serve as pharmaceutically-acceptable carriers include: (1) sugars, such as lactose, glucose and sucrose; (2) starches, such as corn starch and potato starch; (3) cellulose, and its derivatives, such as sodium carboxymethyl cellulose, ethyl cellulose and cellulose acetate; (4) powdered tragacanth; (5) malt; (6) gelatin; (7) lubricating agents, such as magnesium stearate, sodium lauryl sulfate and talc; (8) excipients, such as cocoa butter and suppository waxes; (9) oils, such as peanut oil, cottonseed oil, safflower oil, sesame oil, olive oil, corn oil and soybean oil; (10) glycols, such as propylene glycol; (11) polyols, such as glycerin, sorbitol, mannitol and polyethylene glycol; (12) esters, such as ethyl oleate and ethyl laurate; (13) agar; (14) buffering agents, such as magnesium hydroxide and aluminum hydroxide; (15) alginic acid; (16) pyrogen-free water; (17) isotonic saline; (18) Ringer's solution; (19) ethyl alcohol; (20) pH buffered solutions; (21) polyesters, polycarbonates and/or poly anhydrides; (22) bulking agents, such as polypeptides and amino acids (23) serum component, such as serum albumin, HDL and LDL; and (22) other non-toxic compatible substances employed in pharmaceutical formulations.

[0553] Typical pharmaceutical carriers include, but are not limited to, binding agents (e.g., pregelatinized maize starch, polyvinylpyrrolidone or hydroxypropyl methylcellulose, etc.); fillers (e.g., lactose and other sugars, microcrystalline cellulose, pectin, gelatin, calcium sulfate, ethyl cellulose, polyacrylates or calcium hydrogen phosphate, etc.); lubricants (e.g., magnesium stearate, talc, silica, colloidal silicon dioxide, stearic acid, metallic stearates, hydrogenated vegetable oils, corn starch, polyethylene glycols, sodium benzoate, sodium acetate, etc.); disintegrants (e.g., starch, sodium starch glycolate, etc.); and wetting agents (e.g., sodium lauryl sulphate, etc).

[0554] Pharmaceutically acceptable organic or inorganic excipients suitable for non-parenteral administration which do not deleteriously react with nucleic acids can also be used to formulate the compositions of the present invention. Suitable pharmaceutically acceptable excipients include, but are not limited to, water, salt solutions, alcohols, polyethylene glycols, gelatin, lactose, amylose, magnesium stearate, talc, silicic acid, viscous paraffin, hydroxymethylcellulose, polyvinylpyrrolidone, and the like.

[0555] Formulations for topical administration of nucleic acids can include sterile and non-sterile aqueous solutions, non-aqueous solutions in common solvents such as alcohols, or solutions of the nucleic acids in liquid or solid oil bases. The solutions can also contain buffers, diluents and other suitable additives. Pharmaceutically acceptable organic or inorganic excipients suitable for non-parenteral administration which do not deleteriously react with nucleic acids can be used.

[0556] In one embodiment, the nucleic acid or composition is administered in an unbuffered solution. In certain embodiments, the unbuffered solution is saline or water. In other embodiments, the nucleic acid e.g. RNAi agent is administered in a buffered solution. In such embodiments, the buffer solution can comprise acetate, citrate, prolamine, carbonate, or phosphate, or any combination thereof. For example, the buffer solution can be phosphate buffered saline (PBS).

### Dosages

[0557] The pharmaceutical compositions of the invention may be administered in dosages sufficient to inhibit expression of a gene or modify the expression or function of a target such as an LNCRNA. In general, where the composition comprising a nucleic acid, a suitable dose of a nucleic acid e.g. an siRNA of the invention will be in the range of about 0.001 to about 200.0 milligrams per kilogram body weight of the recipient per day, generally in the range of about 1 to 50 mg per kilogram body weight per day. Typically, a suitable dose of a nucleic acid e.g. an siRNA of the invention will be in the range of about 0.1 mg/kg to about 5.0 mg/kg, e.g., about 0.3 mg/kg and about 3.0 mg/kg.

[0558] A repeat-dose regimen may include administration of a therapeutic amount of a nucleic acid e.g. siRNA on a regular basis, such as every other day or once a year. In certain embodiments, the nucleic acid e.g. siRNA is administered about once per month to about once per quarter (i.e., about once every three months).

[0559] In various embodiments, the nucleic acid e.g. siRNA agent is administered at a dose of about 0.01 mg/kg to about 10 mg/kg or about 0.5 mg/kg to about 50 mg/kg. In some embodiments, the nucleic acid e.g. siRNA agent is administered at a dose of about 10 mg/kg to about 30 mg/kg. In certain embodiments, the nucleic acid e.g. siRNA agent is administered at a dose selected from about 0.5 mg/kg 1 mg/kg, 1.5 mg/kg, 3 mg/kg, 5 mg/kg, 10 mg/kg, and 30 mg/kg. In certain embodiments, the nucleic acid e.g. siRNA agent is administered about once per week, once per month, once every other two months, or once a quarter (i.e., once every three months) at a dose of about 0.1 mg/kg to about 5.0 mg/kg. In certain embodiments, the nucleic acid e.g. siRNA agent is administered to the subject once a week. In certain embodiments, the nucleic acid e.g. siRNA agent is administered to the subject once a month. In certain embodiments, the nucleic acid e.g. siRNA agent is administered once per quarter (i.e., every three months).

[0560] After an initial treatment regimen, the treatments can be administered on a less frequent basis. For example, after administration weekly or biweekly for three months, administration can be repeated once per month, for six months, or a year; or longer.

[0561] The pharmaceutical composition can be administered once daily, or administered as two, three, or more sub-doses at appropriate intervals throughout the day or even using continuous infusion or delivery through a controlled release formulation. In that case, the nucleic acid e.g. siRNA contained in each sub-dose must be correspondingly smaller in order to achieve the total daily dosage. The dosage unit can also be compounded for delivery over several days, e.g., using a conventional sustained release formulation which provides sustained release of the nucleic acid e.g. siRNA over a several day period. Sustained release formulations are well known in the art and are particularly useful for delivery of agents at a particular site, such as could be used with the agents of the present invention. In this embodiment, the dosage unit contains a corresponding multiple of the daily dose.

[0562] In other embodiments, a single dose of the pharmaceutical compositions can be long lasting, such that subsequent doses are administered at not more than 3, 4, or 5 day intervals, or at not more than 1, 2, 3, or 4 week intervals. In some embodiments of the invention, a single dose of the pharmaceutical compositions of the invention is administered once per week. In other embodiments of the invention, a single dose of the pharmaceutical compositions of the invention is administered bimonthly. In certain embodiments, the siRNA is administered about once per month to about once per quarter (i.e., about once every three months), or even every 6 months or 12 months.

[0563] Estimates of effective dosages and in vivo half-lives for the individual nucleic acid e.g. siRNAs encompassed by the invention can be made using conventional methodologies or on the basis of in vivo testing using an appropriate animal model, as known in the art.

[0564] The pharmaceutical compositions of the present invention can be administered in a number of ways depending upon whether local or systemic treatment is desired and upon the area to be treated. Administration can be topical (e.g., by a transdermal patch), pulmonary, e.g., by inhalation or insufflation of powders or aerosols, including by nebulizer; intratracheal, intranasal, epidermal and transdermal, oral or parenteral. Parenteral administration includes intravenous, intraarterial, subcutaneous, intraperitoneal, or intramuscular injection or infusion; subdermal, e.g., via an implanted device; or intracranial, e.g., by intraparenchymal, intrathecal or intraventricular administration. In certain preferred embodiments, the compositions are administered by intravenous infusion or injection. In certain embodiments, the compositions are administered by subcutaneous injection.

[0565] In one embodiment, the nucleic acid e.g. siRNA agent is administered to the subject subcutaneously.

[0566] The inhibitor e.g. nucleic acid e.g. siRNA can be delivered in a manner to target a particular tissue (e.g. in particular liver cells).

### Methods for Inhibiting Gene Expression or Inhibition of Target Expression or Function

[0567] The present invention also provides methods of inhibiting expression of a gene in a cell and methods for inhibiting expression and/or function of other target molecules such as LNCRNA. The methods include contacting a cell with a nucleic acid of the invention e.g. siRNA agent, such as double stranded siRNA agent, in an amount effective to inhibit expression of the gene in the cell, thereby inhibiting expression of the gene in the cell. In a preferred embodiment, the gene encodes an enzyme that is involved in post-translational glycosylation. In a more preferred embodiment, the gene is B4GALT1.

[0568] Contacting of a cell with the inhibitor e.g. the nucleic acid e.g. an siRNA, such as a double stranded siRNA agent, may be done in vitro or in vivo. Contacting a cell in vivo with the inhibitor nucleic acid e.g. siRNA includes contacting a cell or group of cells within a subject, e.g., a human subject, with the nucleic acid e.g. siRNA. Combinations of in vitro and in vivo methods of contacting a cell are also possible. Contacting a cell may be direct or indirect, as discussed above. Furthermore, contacting a cell may be accomplished via a targeting ligand moiety, including any ligand moiety described herein or known in the art. In preferred embodiments, the targeting ligand moiety is a carbohydrate moiety, e.g. a GalNAc3 ligand, or any other ligand moiety that directs the siRNA agent to a site of interest.

[0569] The term “inhibiting,” as used herein, is used interchangeably with “reducing,” “silencing,” “downregulating”, “suppressing”, and other similar terms, and includes any level of inhibition.

[0570] In some embodiments of the methods of the invention, expression or activity of a gene or an inhibition target such as a LNCRNA is inhibited by at least 30%, 35%, 40%, 45%, 50%, 55%, 60%, 65%, 70%, 75%, 80%, 85%, 90%, or 95%, or to below the level of detection of the assay, preferably when determined by qPCR as described herein and/or when the siRNA is introduced into the target cell by transfection. In certain embodiments, the methods include a clinically relevant inhibition of expression of a target gene e.g. as demonstrated by a clinically relevant outcome after treatment of a subject with an agent to reduce the expression of the gene and/or activity of the target.

[0571] In some embodiments, when transfected into the cells, the nucleic acid of the invention inhibits expression of the B4GALT1 gene with an IC50 value lower than 2500 pM, 2400 pM, 2300 pM, 2200 pM, 2100 pM, 2000 pM, 1900 pM, 1800 pM, 1700 pM, 1600 pM, 1500 pM, 1400 pM, 1300 pM, 1200 pM, 1100 pM, 1000 pM, 900 pM, 800 pM, 700 pM, 600 pM, 500 pM, 400 pM, 300 pM, 200 pM or 100 pM, preferably when determined by qPCR, more preferably by reverse transcriptase (RT)-qPCR, as described herein.

[0572] In a preferred embodiment, when transfected into the cells, the nucleic acid of the invention inhibits expression of the B4GALT1 gene with an IC50 value lower than 2500 pM. In a more preferred embodiment, when transfected into the cells, the nucleic acid of the invention inhibits expression of the B4GALT1 gene with an IC50 value lower than 1000 pM. In an even more preferred embodiment, when transfected into the cells, the nucleic acid of the invention inhibits expression of the B4GALT1 gene with an IC50 value lower than 500 pM. In a most preferred embodiment, when transfected into the cells, the nucleic acid of the invention inhibits expression of the B4GALT1 gene with an IC50 value lower than 100 pM.

[0573] Inhibition of expression of the B4GALT1 gene may be quantified using the following method:

[0574] Huh7 cells (human hepatocyte-derived cell line, obtained from JCRB Cell Bank) may be maintained in Dulbecco's Modified Eagle Medium (DMEM) supplemented with 10% FBS at 37° C. in an atmosphere of 5% CO2. Cells may then be transfected with siRNA duplexes targeting B4GALT1 mRNA or a negative control siRNA (siRNA-control; sense strand 5′-UUCUCCGAACGUGUCACGUTT-3′ (SEQ ID NO:623), antisense strand 5′-ACGUGACACGUUCGGAGAATT-3′ (SEQ ID NO:622)) using 10×3-fold serial dilutions over a final duplex concentration range of 20 nM to 1 pM. Transfection may be carried out by adding 9.7 μL Opti-MEM (ThermoFisher) plus 0.3 μL Lipofectamine RNAiMAX (ThermoFisher) to 10 μL of each siRNA duplex. The mixture may be incubated at room temperature for 15 minutes before being added to 100 μL of complete growth medium containing 20,000 Huh7 cells. Cells may be incubated for 24 hours at 37° C./5% CO2 prior to total RNA purification using a RNeasy 96 Kit (Qiagen). Each duplex may be tested by transfection in duplicate wells in a single experiment.

[0575] cDNA synthesis may be performed using FastQuant RT (with gDNase) Kit (Tiangen). Real-time quantitative PCR (qPCR) may be performed on an ABI Prism 7900HT or ABI QuantStudio 7 with primers specific for human B4GALT1 (Hs00155245 ml) and human GAPDH (Hs02786624_g1) using a TaqMan Gene Expression Assay Kit (ThermoFisher Scientific).

[0576] qPCR may be performed in duplicate on cDNA derived from each well and the mean cycle threshold (Ct) calculated. Relative B4GALT1 expression may be calculated from mean Ct values using the comparative Ct (ΔΔCt) method, normalised to GAPDH and relative to untreated cells. Maximum percent inhibition of B4GALT1 expression and IC50 values may be calculated using a four parameter (variable slope) model using GraphPad Prism 9.

[0577] Alternatively or in addition, the inhibitory potential of a nucleic acid of the invention may be quantified without prior transfection of a target cell with said nucleic acid.

[0578] Thus, in some embodiments, when cells are incubated with a nucleic acid of the invention, the nucleic acid of the invention inhibits expression of the B4GALT1 gene with an EC50 value lower than 1000 nM, 900 nM, 800 nM, 700 nM, 600 nM, 500 nM, 400 nM, 300 nM, 200 nM, or 100 nM, preferably when determined by qPCR, more preferably by reverse transcriptase (RT)-qPCR, as described herein.

[0579] In a preferred embodiment, when cells are incubated with a nucleic acid of the invention, the nucleic acid of the invention inhibits expression of the B4GALT1 gene with an EC50 value lower than 1000 nM. In a more preferred embodiment, when cells are incubated with a nucleic acid of the invention, the nucleic acid of the invention inhibits expression of the B4GALT1 gene with an EC50 value lower than 500 nM. In an even more preferred embodiment, when cells are incubated with a nucleic acid of the invention, the nucleic acid of the invention inhibits expression of the B4GALT1 gene with an EC50 value lower than 200 nM. In a most preferred embodiment, when cells are incubated with a nucleic acid of the invention, the nucleic acid of the invention inhibits expression of the B4GALT1 gene with an EC50 value lower than 100 nM.

[0580] Inhibition of expression of the B4GALT1 gene in the presence of free nucleic acids may be quantified using the following method:

[0581] Primary C57BL/6 mouse hepatocytes (PMHs) may be isolated fresh by two-step collagenase liver perfusion. Cells may be maintained in DMEM (Gibco-11995-092) supplemented with FBS, Penicillin/Streptomycin, HEPES and L-glutamine. Cells may be cultured at 37° C. in an atmosphere with 5% CO₂ in a humidified incubator. Within 2 hours post isolation, PMHs may be seeded at a density of 36,000 cells/well in regular 96-well tissue culture plates. Dose response analysis in PMHs may be done by direct incubation of cells in a gymnotic free uptake setting with final GalNAc-siRNA concentrations of 1000, 500, 250, 125, 62.5, 31.3, 15.6, 7.8, 3.9, 1.95 nM. In control wells, cells may be incubated without GalNAc-siRNA. After 48 hr incubation, cells may be harvested for RNA extraction. Total RNA may be extracted using RNeasy Kit following the manufacturer's instructions (Qiagen, Shanghai, China). After reverse transcription, real-time quantitative PCR may be performed using an ABI Prism 7900HT to detect the relative abundance of B4GALT1 mRNA normalized to the housekeeping gene GAPDH. The expression of the target gene in each test sample may be determined by relative quantitation using the comparative Ct (ΔΔCt) method. This method measures the Ct differences (ΔCt) between target gene and housekeeping gene. The formula is as follows: ΔCt=average Ct of B4GALT1−average Ct of GAPDH, ΔΔCt=ΔCt (sample)−average ΔCt (untreated control), relative expression of target gene mRNA=2^{-ΔΔCt}.

[0582] Alternatively or in addition, inhibition of expression of the B4GALT1 gene may be characterized by a reduction of mean relative expression of the B4GALT1 gene.

[0583] In some embodiments, when cells are transfected with 0.1 nM of the nucleic acid of the invention, the mean relative expression of B4GALT1 is below 1, 0.9, 0.8, 0.7, 0.6, 0.5, or 0.4, preferably when determined by qPCR, more preferably by reverse transcriptase (RT)-qPCR, as described herein.

[0584] In some embodiments, when cells are transfected with 5 nM of the nucleic acid of the invention, the mean relative expression of B4GALT1 is below 1, 0.9, 0.8, 0.7, 0.6, 0.5, 0.4 or 0.3, preferably when determined by qPCR, more preferably by reverse transcriptase (RT)-qPCR, as described herein.

[0585] Mean relative expression of the B4GALT1 gene may be quantified using the following method:

[0586] Huh7 cells (human hepatocyte-derived cell line, obtained from JCRB Cell Bank) may be maintained in Dulbecco's Modified Eagle Medium (DMEM) supplemented with 10% FBS at 37° C. in at atmosphere of 5% CO₂. Cells may be transfected with siRNA duplexes targeting B4GALT1 mRNA or a negative control siRNA (siRNA-control; sense strand 5′-UUCUCCGAACGUGUCACGUTT-3′(SEQ ID NO:623), antisense strand 5′-ACGUGACACGUUCGGAGAATT-3′ (SEQ ID NO:622)) at a final duplex concentration of 5 nM and 0.1 nM. Transfection may be carried out by adding 9.7 μL Opti-MEM (ThermoFisher) plus 0.3 μL Lipofectamine RNAiMAX (ThermoFisher) to 10 μL of each siRNA duplex. The mixture may be incubated at room temperature for 15 minutes before being added to 100 μL of complete growth medium containing 20,000 Huh7 cells. Cells may be incubated for 24 hours at 37° C./5% CO₂ prior to total RNA purification using a RNeasy 96 Kit (Qiagen). Each duplex may be tested by transfection in duplicate wells in two independent experiments.

[0587] cDNA synthesis may be performed using FastQuant RT (with gDNase) Kit (Tiangen). Real-time quantitative PCR (qPCR) may be performed on an ABI Prism 7900HT or ABI QuantStudio 7 with primers specific for human B4GALT1 (Hs00155245 ml) and human GAPDH (Hs02786624_g1) using a TaqMan Gene Expression Assay Kit (ThermoFisher Scientific).

[0588] qPCR may be performed in duplicate on cDNA derived from each well and the mean Ct calculated. Relative B4GALT1 expression may be calculated from mean Ct values using the comparative Ct (ΔΔCt) method, normalised to GAPDH and relative to untreated cells

[0589] Inhibition of the expression of a gene may be manifested by a reduction of the amount of mRNA of the target gene of interest in comparison to a suitable control. Inhibition of the function of a target may be manifested by a reduction of the activity of the target in comparison to a suitable control.

[0590] In other embodiments, inhibition of the expression of a gene or other target may be assessed in terms of a reduction of a parameter that is functionally linked to gene expression, e.g, protein expression or signalling pathways.

Methods of Treating or Preventing Diseases Associated with Gene Expression/Expression of Function of a Target e.g. LCNRNA

[0591] The present invention also provides methods of using nucleic acid e.g. an siRNA of the invention or a composition containing nucleic acid e.g. an siRNA of the invention to reduce or inhibit gene expression in a cell or reduce expression or function of a target. The methods include contacting the cell with a nucleic acid e.g. dsiRNA of the invention and maintaining the cell for a time sufficient to obtain degradation of the mRNA transcript of a gene, thereby inhibiting expression of the gene in the cell. Reduction in gene expression or function of a target can be assessed by any methods known in the art. In a preferred embodiment, the gene encodes an enzyme that is involved in post-translational glycosylation. In a more preferred embodiment, the gene is B4GALT1.

[0592] In the methods of the invention the cell may be contacted in vitro or in vivo, i.e., the cell may be within a subject.

[0593] A cell suitable for treatment using the methods of the invention may be any cell that expresses a gene of interest or target of interest associated with disease.

[0594] The in vivo methods of the invention may include administering to a subject a composition containing a nucleic acid of the invention e.g. an siRNA, where the nucleic acid e.g. siRNA includes a nucleoside sequence that is complementary to at least a part of an RNA transcript of the gene of the mammal to be treated, or complementary to another nucleic acid the expression and/or function of which is associated with diseases.

[0595] The present invention further provides methods of treatment of a subject in need thereof. The treatment methods of the invention include administering a nucleic acid such as an siRNA of the invention to a subject, e.g., a subject that would benefit from a reduction or inhibition of the expression of a gene and/or expression and/or function of a target, in a therapeutically effective amount e.g. a nucleic acid such as an siRNA targeting a gene or a pharmaceutical composition comprising the nucleic acid targeting a gene.

[0596] A nucleic acid e.g. siRNA of the invention may be administered as a “free” nucleic acid or “free” siRNA, administered in the absence of a pharmaceutical composition. The naked nucleic acid may be in a suitable buffer solution. The buffer solution may comprise acetate, citrate, prolamine, carbonate, or phosphate, or any combination thereof. In one embodiment, the buffer solution is phosphate buffered saline (PBS). The pH and osmolarity of the buffer solution can be adjusted such that it is suitable for administering to a subject.

[0597] Alternatively, a nucleic acid e.g. siRNA of the invention may be administered as a pharmaceutical composition, such as a dsiRNA liposomal formulation.

[0598] In one embodiment, the method includes administering a composition featured herein such that expression of the target gene is decreased, such as for about 1, 2, 3, 4, 5, 6, 7, 8, 12, 16, 18, 24 hours, 28, 32, or about 36 hours. In one embodiment, expression of the target gene is decreased for an extended duration, e.g., at least about two, three, four days or more, e.g., about one week, two weeks, three weeks, or four weeks or longer, e.g., about 1 month, 2 months, or 3 months.

[0599] Subjects can be administered a therapeutic amount of nucleic acid e.g. siRNA, such as about 0.01 mg/kg to about 200 mg/kg.

[0600] The nucleic acid e.g. siRNA can be administered by intravenous infusion over a period of time, on a regular basis. In certain embodiments, after an initial treatment regimen, the treatments can be administered on a less frequent basis. Administration of the siRNA can reduce gene product levels of a target gene, e.g., in a cell or tissue of the patient by at least about 20%, 25%, 30%, 35%, 40%, 45%, 50%, 55%, 60%, 65%, 70%, 75%, 80%, 85%, 90%, or 95%, or below the level of detection of the assay method used. In certain embodiments, administration results in clinical stabilization or preferably clinically relevant reduction of at least one sign or symptom of a gene-associated disorder.

[0601] Alternatively, the nucleic acid e.g. siRNA can be administered subcutaneously, i.e., by subcutaneous injection. One or more injections may be used to deliver the desired daily dose of nucleic acid e.g. siRNA to a subject. The injections may be repeated over a period of time. The administration may be repeated on a regular basis. In certain embodiments, after an initial treatment regimen, the treatments can be administered on a less frequent basis. A repeat-dose regimen may include administration of a therapeutic amount of nucleic acid on a regular basis, such as every other day or to once a year. In certain embodiments, the nucleic acid is administered about once per month to about once per quarter (i.e., about once every three months).

[0602] In one aspect the present invention may be applied in the compounds, processes, compositions or uses of the following Sentences numbered 1-101 (wherein reference to any Formula in the Sentences 1-101 refers only to those Formulas that are defined within Sentences 1-101. These formulae are reproduced in FIG. 6) 1. A compound comprising the following structure:

[chemical structure]

[0603] wherein:
[0604] R₁ at each occurrence is independently selected from the group consisting of hydrogen, methyl and ethyl;
[0605] R₂ is selected from the group consisting of hydrogen, hydroxy, —OC₁₋₃alkyl, —C(═O)OC₁₋₃alkyl, halo and nitro;
[0606] X₁ and X₂ at each occurrence are independently selected from the group consisting of methylene, oxygen and sulfur;
[0607] m is an integer of from 1 to 6;
[0608] n is an integer of from 1 to 10;
[0609] q, r, s, t, v are independently integers from 0 to 4, with the proviso that:
[0610] (i) q and r cannot both be 0 at the same time; and
[0611] (ii) s, t and v cannot all be 0 at the same time;
[0612] Z is an oligonucleoside moiety.
[0613] 2. A compound according to Sentence 1, wherein R₁ is hydrogen at each occurrence.
[0614] 3. A compound according to Sentence 1, wherein R₁ is methyl.
[0615] 4. A compound according to Sentence 1, wherein R₁ is ethyl.
[0616] 5. A compound according to any of Sentences 1 to 4, wherein R₂ is hydroxy.
[0617] 6. A compound according to any of Sentences 1 to 4, wherein R₂ is halo.
[0618] 7. A compound according to Sentence 6, wherein R₂ is fluoro.
[0619] 8. A compound according to Sentence 6, wherein R₂ is chloro.
[0620] 9. A compound according to Sentence 6, wherein R₂ is bromo.
[0621] 10. A compound according to Sentence 6, wherein R₂ is iodo.
[0622] 11. A compound according to Sentence 6, wherein R₂ is nitro.
[0623] 12. A compound according to any of Sentences 1 to 11, wherein X₁ is methylene.
[0624] 13. A compound according to any of Sentences 1 to 11, wherein X₁ is oxygen.
[0625] 14. A compound according to any of Sentences 1 to 11, wherein X₁ is sulfur.
[0626] 15. A compound according to any of Sentences 1 to 14, wherein X₂ is methylene.
[0627] 16. A compound according to any of Sentences 1 to 15, wherein X₂ is oxygen.
[0628] 17. A compound according to any of Sentences 1 to 16, wherein X₂ is sulfur.
[0629] 18. A compound according to any of Sentences 1 to 17, wherein m=3.
[0630] 19. A compound according to any of Sentences 1 to 18, wherein n=6.
[0631] 20. A compound according to Sentences 13 and 15, wherein X₁ is oxygen and X₂ is methylene, and preferably wherein:
   [0632] q=1,
   [0633] r=2,
   [0634] s=1,
   [0635] t=1,
   [0636] v=1.
[0637] 21. A compound according to Sentences 12 and 15, wherein both X₁ and X₂ are methylene, and preferably wherein:
   [0638] q=1,
   [0639] r=3,
   [0640] s=1,
   [0641] t=1,
   [0642] v=1.
[0643] 22. A compound according to any of Sentences 1 to 21, wherein Z is:

[chemical structure]

[0644] wherein:
[0645] Z₁, Z₂, Z₃, Z₄ are independently at each occurrence oxygen or sulfur; and
[0646] one the bonds between P and Z₂, and P and Z₃ is a single bond and the other bond is a double bond.
[0647] 23. A compound according to Sentence 22, wherein said oligonucleoside is an RNA compound capable of modulating, preferably inhibiting, expression of a target gene.
[0648] 24. A compound according to Sentence 23, wherein said RNA compound comprises an RNA duplex comprising first and second strands, wherein the first strand is at least partially complementary to an RNA sequence of a target gene, and the second strand is at least partially complementary to said first strand, and wherein each of the first and second strands have 5′ and 3′ ends.
[0649] 25. A compound according to Sentence 24, wherein the RNA compound is attached at the 5′ end of its second strand to the adjacent phosphate.
[0650] 26. A compound according to Sentence 24, wherein the RNA compound is attached at the 3′ end of its second strand to the adjacent phosphate.
[0651] 27. A compound of Formula (II):

[chemical structure]

[0652] 28. A compound of Formula (III):

[chemical structure]

[0653] 29. A compound according to Sentence 27 or 28, wherein the oligonucleoside comprises an RNA duplex comprising first and second strands, wherein the first strand is at least partially complementary to an RNA sequence of a target gene, and the second strand is at least partially complementary to said first strand, and wherein each of the first and second strands have 5′ and 3′ ends, and wherein said RNA duplex is attached at the 5′ end of its second strand to the adjacent phosphate.
[0654] 30. A composition comprising a compound of Formula (II) as defined in Sentence 27, and a compound of Formula (III) as defined in Sentence 28, optionally dependent on Sentence 29.
[0655] 31. A composition according to Sentence 30, wherein said compound of Formula (III) as defined in Sentence 28 is present in an amount in the range of 10 to 15% by weight of said composition.
[0656] 32. A compound of Formula (IV):

[chemical structure]

[0657] 33. A compound of Formula (V):

[chemical structure]

[0658] 34. A compound according to Sentence 32 or 33, wherein the oligonucleoside comprises an RNA duplex comprising first and second strands, wherein the first strand is at least partially complementary to an RNA sequence of a target gene, and the second strand is at least partially complementary to said first strand, and wherein each of the first and second strands have 5′ and 3′ ends, and wherein said RNA duplex is attached at the 3′ end of its second strand to the adjacent phosphate.
[0659] 35. A composition comprising a compound of Formula (IV) as defined in Sentence 32, and a compound of Formula (V) as defined in Sentence 33, optionally dependent on Sentence 34.
[0660] 36. A composition according to Sentence 35, wherein said compound of Formula (V) as defined in Sentence 33 is present in an amount in the range of 10 to 15% by weight of said composition.
[0661] 37. A compound as defined in any of Sentences 1 to 29, or 32 to 34, wherein the oligonucleoside comprises an RNA duplex which further comprises one or more riboses modified at the 2′ position, preferably a plurality of riboses modified at the 2′ position.
[0662] 38. A compound according to Sentence 37, wherein the modifications are chosen from 2′-O-methyl, 2′-deoxy-fluoro, and 2′-deoxy.
[0663] 39. A compound according to any of Sentences 1 to 29, or 32 to 34, or 37 to 38, wherein the oligonucleoside further comprises one or more degradation protective moieties at one or more ends.
[0664] 40. A compound according to Sentence 39, wherein said one or more degradation protective moieties are not present at the end of the oligonucleoside strand that carries the ligand moieties, and/or wherein said one or more degradation protective moieties is selected from phosphorothioate internucleoside linkages, phosphorodithioate internucleoside linkages and inverted abasic nucleosides, wherein said inverted abasic nucleosides are present at the distal end of the strand that carries the ligand moieties.
[0665] 41. A compound according to any of Sentences 1 to 29, or 32 to 34, or 37 to 40, wherein said ligand moiety as depicted in Formula (I) in Sentence 1 comprises one or more ligands.
[0666] 42. A compound according to Sentence 41, wherein said ligand moiety as depicted in Formula (I) in Sentence 1 comprises one or more carbohydrate ligands.
[0667] 43. A compound according to Sentence 42, wherein said one or more carbohydrates can be a monosaccharide, disaccharide, trisaccharide, tetrasaccharide, oligosaccharide or polysaccharide.
[0668] 44. A compound according to Sentence 43, wherein said one or more carbohydrates comprise one or more galactose moieties, one or more lactose moieties, one or more N-AcetylGalactosamine moieties, and/or one or more mannose moieties.
[0669] 45. A compound according to Sentence 44, wherein said one or more carbohydrates comprise one or more N-Acetyl-Galactosamine moieties.
[0670] 46. A compound according to Sentence 45, which comprises two or three N-AcetylGalactosamine moieties.
[0671] 47. A compound according to any of Sentences 41 to 46, wherein said one or more ligands are attached in a linear configuration, or in a branched configuration.
[0672] 48. A compound according to Sentence 47, wherein said one or more ligands are attached as a biantennary or triantennary branched configuration.
[0673] 49. A compound according to Sentences 46 to 48, wherein said moiety:

[chemical structure]

[0674] as depicted in Formula (I) in Sentence 1 is any of Formulae (VIa), (VIb) or (VIc), preferably Formula (VIa):

[chemical structure]

[0675] wherein:
[0676] A₁ is hydrogen, or a suitable hydroxy protecting group;
[0677] a is an integer of 2 or 3; and
[0678] b is an integer of 2 to 5; or

[chemical structure]

[0679] wherein:
[0680] A₁ is hydrogen, or a suitable hydroxy protecting group;
[0681] a is an integer of 2 or 3; and
[0682] c and d are independently integers of 1 to 6; or

[chemical structure]

[0683] wherein:
[0684] A₁ is hydrogen, or a suitable hydroxy protecting group;
[0685] a is an integer of 2 or 3; and
[0686] e is an integer of 2 to 10.
[0687] 50. A compound according to Sentences 46 to 48, wherein said moiety:

[chemical structure]

[0688] as depicted in Formula (I) in Sentence 1 is Formula (VII):

[chemical structure]

[0689] wherein:
[0690] A₁ is hydrogen;
[0691] a is an integer of 2 or 3.
[0692] 51. A compound according to Sentence 49 or 50, wherein a=2.
[0693] 52. A compound according to Sentence 49 or 50, wherein a=3.
[0694] 53. A compound according to Sentence 49, wherein b=3.

[chemical structure]

[0695] 54. A compound of Formula (VIII):

[chemical structure]

[0696] 56. A compound according to Sentence 54 or 55, wherein the oligonucleoside comprises an RNA duplex comprising first and second strands, wherein the first strand is at least partially complementary to an RNA sequence of a target gene, and the second strand is at least partially complementary to said first strand, and wherein each of the first and second strands have 5′ and 3′ ends, and wherein said RNA duplex is attached at the 5′ end of its second strand to the adjacent phosphate.
[0697] 57. A composition comprising a compound of Formula (VIII) as defined in Sentence 54, and a compound of Formula (IX) as defined in Sentence 55, optionally dependent on Sentence 56.
[0698] 58. A composition according to Sentence 57, wherein said compound of Formula (IX) as defined in Sentence 55 is present in an amount in the range of 10 to 15% by weight of said composition.
[0699] 59. A compound of Formula (X):

[chemical structure]

[0700] 60. A compound of Formula (XS):

[chemical structure]

[0701] 61. A compound according to Sentence 59 or 60, wherein the oligonucleoside comprises an RNA duplex comprising first and second strands, wherein the first strand is at least partially complementary to an RNA sequence of a target gene, and the second strand is at least partially complementary to said first strand, and wherein each of the first and second strands have 5′ and 3′ ends, and wherein said RNA duplex is attached at the 3′ end of its second strand to the adjacent phosphate.
[0702] 62. A composition comprising a compound of Formula (X) as defined in Sentence 59, and a compound of Formula (XI) as defined in Sentence 60, optionally dependent on Sentence 61.
[0703] 63. A composition according to Sentence 62, wherein said compound of Formula (XI) as defined in Sentence 60 is present in an amount in the range of 10 to 15% by weight of said composition.
[0704] 64. A compound as defined in any of Sentences 54 to 63, wherein the oligonucleoside comprises an RNA duplex which further comprises one or more riboses modified at the 2′ position, preferably a plurality of riboses modified at the 2′ position.
[0705] 65. A compound according to Sentence 64, wherein the modifications are chosen from 2′-O-methyl, 2′-deoxy-fluoro, and 2′-deoxy.
[0706] 66. A compound according to any of Sentences 54 to 65, wherein the oligonucleoside further comprises one or more degradation protective moieties at one or more ends.
[0707] 67. A compound according to Sentence 66, wherein said one or more degradation protective moieties are not present at the end of the oligonucleoside strand that carries the ligand moieties, and/or wherein said one or more degradation protective moieties is selected from phosphorothioate internucleoside linkages, phosphorodithioate internucleoside linkages and inverted abasic nucleosides, wherein said inverted abasic nucleosides are present at the distal end of the strand that carries the ligand moieties, as shown in any of Formulae (VIII), (IX), (X) or (XI) in any of Sentences 54, 55, 59 or 60.
[0708] 68. A process of preparing a compound according to any of Sentences 1 to 29, 32 to 34, 37 to 56, 59 to 61, and 64 to 67, and/or a composition according to any of Sentences 30, 31, 35, 36, 57, 58, 62, 63, which comprises reacting compounds of Formulae (XII) and (XIII):

[chemical structure]

[0709] herein:
[0710] R₁ at each occurrence is independently selected from the group consisting of hydrogen, methyl and ethyl;
[0711] R₂ is selected from the group consisting of hydrogen, hydroxy, —OC₁₋₃alkyl, —C(═O)OC₁₋₃alkyl, halo and nitro;
[0712] X₁ and X₂ at each occurrence are independently selected from the group consisting of methylene, oxygen and sulfur;
[0713] m is an integer of from 1 to 6;
[0714] n is an integer of from 1 to 10;
[0715] q, r, s, t, v are independently integers from 0 to 4, with the proviso that:
[0716] (i) q and r cannot both be 0 at the same time; and
[0717] (ii) s, t and v cannot all be 0 at the same time;
[0718] Z is an oligonucleoside moiety;
[0719] and where appropriate carrying out deprotection of the ligand and/or annealing of a second strand for the oligonucleoside moiety.
[0720] 69. A process according to Sentence 68, wherein a compound of Formula (XII) is prepared by reacting compounds of Formulae (XIV) and (XV):

[chemical structure]

[0721] R₁ at each occurrence is independently selected from the group consisting of hydrogen, methyl and ethyl;
[0722] R₂ is selected from the group consisting of hydrogen, hydroxy, —OC₁₋₃alkyl, —C(═O)OC₁₋₃alkyl, halo and nitro;
[0723] X₁ and X₂ at each occurrence are independently selected from the group consisting of methylene, oxygen and sulfur;
[0724] q, r, s, t, v are independently integers from 0 to 4, with the proviso that:
[0725] (i) q and r cannot both be 0 at the same time; and
[0726] (ii) s, t and v cannot all be 0 at the same time;
[0727] Z is an oligonucleoside moiety.
[0728] 70. A process according to Sentence 68, to prepare a compound according to any of Sentences 20, 25, 27, 29, 54, 56, and/or a composition according to any of Sentences 30, 31, 57, 58, wherein:
[0729] compound of Formula (XII) is Formula (XIIa):

[chemical structure]

[0730] and compound of Formula (XIII) is Formula (XIIIa):

[chemical structure]

[0731] wherein the oligonucleoside comprises an RNA duplex comprising first and second strands, wherein the first strand is at least partially complementary to an RNA sequence of a target gene, and the second strand is at least partially complementary to said first strand, and wherein each of the first and second strands have 5′ and 3′ ends, and wherein said RNA duplex is attached at the 5′ end of its second strand to the adjacent phosphate.
[0732] 71. A process according to Sentence 68, to prepare a compound according to any of Sentences 20, 25, 28, 29, 55, 56, and/or a composition according to any of Sentences 30, 31, 57, 58, wherein:
[0733] compound of Formula (XII) is Formula (XIIb):

[chemical structure]

[0734] and compound of Formula (XIII) is Formula (XIIIa):

[chemical structure]

[0735] wherein the oligonucleoside comprises an RNA duplex comprising first and second strands, wherein the first strand is at least partially complementary to an RNA sequence of a target gene, and the second strand is at least partially complementary to said first strand, and wherein each of the first and second strands have 5′ and 3′ ends, and wherein said RNA duplex is attached at the 5′ end of its second strand to the adjacent phosphate.
[0736] 72. A process according to Sentence 68, to prepare a compound according to any of Sentences 21, 26, 32, 34, 59, 61, and/or a composition according to any of Sentences 35, 36, 62, 63, wherein:
[0737] compound of Formula (XII) is Formula (XIIc):

[chemical structure]

[0738] and compound of Formula (XIII) is Formula (XIIIa):

[chemical structure]

[0739] wherein the oligonucleoside comprises an RNA duplex comprising first and second strands, wherein the first strand is at least partially complementary to an RNA sequence of a target gene, and the second strand is at least partially complementary to said first strand, and wherein each of the first and second strands have 5′ and 3′ ends, and wherein said RNA duplex is attached at the 3′ end of its second strand to the adjacent phosphate.
[0740] 73. A process according to Sentence 68, to prepare a compound according to any of Sentences 21, 26, 33, 34, 60, 61, and/or a composition according to any of Sentences 35, 36, 62, 63, wherein:
[0741] compound of Formula (XII) is Formula (XIId):

[chemical structure]

[0742] and compound of Formula (XIII) is Formula (XIIIa):

[chemical structure]

[0743] wherein the oligonucleoside comprises an RNA duplex comprising first and second strands, wherein the first strand is at least partially complementary to an RNA sequence of a target gene, and the second strand is at least partially complementary to said first strand, and wherein each of the first and second strands have 5′ and 3′ ends, and wherein said RNA duplex is attached at the 3′ end of its second strand to the adjacent phosphate.
[0744] 74. A process according to any of Sentences 70 to 73, wherein:
[0745] compound of Formula (XIIIa) is Formula (XIIIb):

[chemical structure]

[0746] 75. A process according to Sentences 69, as dependent on Sentences 70 to 73, wherein:
[0747] compound of Formula (XIV) is either Formula (XIVa) or Formula (XIVb):

[chemical structure]

[0748] and compound of Formula (XV) is either Formula (XVa) or Formula (XIVb):

[chemical structure]

[0749] wherein the oligonucleoside comprises an RNA duplex comprising first and second strands, wherein the first strand is at least partially complementary to an RNA sequence of a target gene, and the second strand is at least partially complementary to said first strand, and wherein each of the first and second strands have 5′ and 3′ ends, and wherein (i) said RNA duplex is attached at the 5′ end of its second strand to the adjacent phosphate in Formula (XVa), or (ii) said RNA duplex is attached at the 3′ end of its second strand to the adjacent phosphate in Formula (XVb).
[0750] 76. A compound of Formula (XII):

[chemical structure]

[0751] wherein:
[0752] R₁ at each occurrence is independently selected from the group consisting of hydrogen, methyl and ethyl;
[0753] R₂ is selected from the group consisting of hydrogen, hydroxy, —OC₁₋₃alkyl, —C(═O)OC₁₋₃alkyl, halo and nitro;
[0754] X₁ and X₂ at each occurrence are independently selected from the group consisting of methylene, oxygen and sulfur;
[0755] q, r, s, t, v are independently integers from 0 to 4, with the proviso that:
[0756] (i) q and r cannot both be 0 at the same time; and
[0757] (ii) s, t and v cannot all be 0 at the same time;
[0758] Z is an oligonucleoside moiety.
[0759] 77. A compound of Formula (XIIa):

[chemical structure]

[0760] 78. A compound of Formula (XIIb):

[chemical structure]

[0761] 79. A compound of Formula (XIIc):

[chemical structure]

[0762] 80. A compound of Formula (XIId):

[chemical structure]

[0763] 81. A compound of Formula (XIII):

[chemical structure]

[0764] wherein:
[0765] R₁ at each occurrence is independently selected from the group consisting of hydrogen, methyl and ethyl;
[0766] m is an integer of from 1 to 6;
[0767] n is an integer of from 1 to 10.
[0768] 82. A compound of Formula (XIIIa):

[chemical structure]

[0769] 83. A compound of Formula (XIIIb):

[chemical structure]

[0770] 84. A compound of Formula (XIV):

[chemical structure]

[0771] wherein:
[0772] R₁ is selected from the group consisting of hydrogen, methyl and ethyl;
[0773] R₂ is selected from the group consisting of hydrogen, hydroxy, —OC₁₋₃alkyl, —C(═O)OC₁₋₃alkyl, halo and nitro;
[0774] X₂ is selected from the group consisting of methylene, oxygen and sulfur;
[0775] s, t, v are independently integers from 0 to 4, with the proviso that s, t and v cannot all be 0 at the same time.
[0776] 85. A compound of Formula (XIVa):

[chemical structure]

[0777] 86. A compound of Formula (XIVb):

[chemical structure]

[0778] 87. A compound of Formula (XV):

[chemical structure]

[0779] wherein:
[0780] R₁ at each occurrence is independently selected from the group consisting of hydrogen, methyl and ethyl;
[0781] X₁ is selected from the group consisting of methylene, oxygen and sulfur;
[0782] q and r are independently integers from 0 to 4, with the proviso that q and r cannot both be 0 at the same time;
[0783] Z is an oligonucleoside moiety.
[0784] 88. A compound of Formula (XVa):

[chemical structure]

[0785] 89. A compound of Formula (XVb):

[chemical structure]

[0786] 90. Use of a compound according to any of Sentences 76, 81 to 84, 87, for the preparation of a compound according to any of Sentences 1 to 29, 32 to 34, 37 to 56, 59 to 61, and 64 to 67, and/or a composition according to any of Sentences 30, 31, 35, 36, 57, 58, 62 and 63.
[0787] 91. Use of a compound according to Sentence 85, for the preparation of a compound according to any of Sentences 1 to 29, 32 to 34, 37 to 56, 59 to 61, and 64 to 67, and/or a composition according to any of Sentences 30, 31, 35, 36, 57, 58, 62 and 63, wherein R₂═F.
[0788] 92. Use of a compound according to Sentence 86, for the preparation of a compound according to any of Sentences 1 to 29, 32 to 34, 37 to 56, 59 to 61, and 64 to 67, and/or a composition according to any of Sentences 30, 31, 35, 36, 57, 58, 62 and 63, wherein R₂═OH.
[0789] 93. Use of a compound according to Sentence 77, for the preparation of a compound according to any of Sentences 20, 25, 27, 29, 54, 56, and/or a composition according to any of Sentences 30, 31, 57, 58.
[0790] 94. Use of a compound according to Sentence 78, for the preparation of a compound according to any of Sentences 20, 25, 28, 29, 55, 56, and/or a composition according to any of Sentences 30, 31, 57, 58.
[0791] 95. Use of a compound according to Sentence 79, for the preparation of a compound according to any of Sentences 21, 26, 32, 34, 59, 61, and/or a composition according to any of Sentences 35, 36, 62, 63.
[0792] 96. Use of a compound according to Sentence 80, for the preparation of a compound according to any of Sentences 21, 26, 33, 34, 60, 61, and/or a composition according to any of Sentences 35, 36, 62, 63.
[0793] 97. Use of a compound according to Sentence 88, for the preparation of a compound according to any of Sentences 20, 25, 27 to 29, 54 to 56, and/or a composition according to any of Sentences 30, 31, 57, 58.
[0794] 98. Use of a compound according to Sentence 89, for the preparation of a compound according to any of Sentences 21, 26, 32 to 34, 59 to 61, and/or a composition according to any of Sentences 35, 36, 62, 63.
[0795] 99. A compound or composition obtained, or obtainable by a process according to any of Sentences 68 to 75.
[0796] 100. A pharmaceutical composition comprising of a compound according to any of Sentences 1 to 29, 32 to 34, 37 to 56, 59 to 61, and 64 to 67, and/or a composition according to any of Sentences 30, 31, 35, 36, 57, 58, 62 and 63, together with a pharmaceutically acceptable carrier, diluent or excipient.
[0797] 101. A compound according to any of Sentences 1 to 29, 32 to 34, 37 to 56, 59 to 61, and 64 to 67, and/or a composition according to any of Sentences 30, 31, 35, 36, 57, 58, 62 and 63, for use in therapy.

[0798] In another aspect the present invention may be applied in the compounds, processes, compositions or uses of the following Clauses numbered 1-56 (wherein reference to any Formula in the Clauses refers only to those Formulas that are defined within Clause 1-56. These formulae are reproduced in FIG. 7).
[0799] 1. A compound comprising the following structure:

[chemical structure]

[0800] wherein:
[0801] r and s are independently an integer selected from 1 to 16; and
[0802] Z is an oligonucleoside moiety.
[0803] 2. A compound according to Clause 1, wherein s is an integer selected from 4 to 12.
[0804] 3. A compound according to Clause 2, wherein s is 6.
[0805] 4. A compound according to any of Clauses 1 to 3, wherein r is an integer selected from 4 to 14.
[0806] 5. A compound according to Clause 4, wherein r is 6.
[0807] 6. A compound according to Clause 4, wherein r is 12.
[0808] 7. A compound according to Clause 5, which is dependent on Clause 3.
[0809] 8. A compound according to Clause 6, which is dependent on Clause 3.
[0810] 9. A compound according to any of Clauses 1 to 8, wherein Z is:

[chemical structure]

[0811] wherein:
[0812] Z₁, Z₂, Z₃, Z₄ are independently at each occurrence oxygen or sulfur; and one the bonds between P and Z₂, and P and Z₃ is a single bond and the other bond is a double bond.
[0813] 10. A compound according to any of Clauses 1 to 9, wherein said oligonucleoside is an RNA compound capable of modulating, preferably inhibiting, expression of a target gene.
[0814] 11. A compound according to any of Clause 10, wherein said RNA compound comprises an RNA duplex comprising first and second strands, wherein the first strand is at least partially complementary to an RNA sequence of a target gene, and the second strand is at least partially complementary to said first strand, and wherein each of the first and second strands have 5′ and 3′ ends.
[0815] 12. A compound according to Clause 11, preferably also dependent on Clauses 3 and 6, wherein the RNA compound is attached at the 5′ end of its second strand to the adjacent phosphate.
[0816] 13. A compound according to Clause 11, preferably also dependent on Clauses 3 and 5, wherein the RNA compound is attached at the 3′ end of its second strand to the adjacent phosphate.
[0817] 14. A compound of Formula (II*), preferably dependent on Clause 12:

[chemical structure]

[0818] 15. A compound of Formula (III*), preferably dependent on Clause 13:

[chemical structure]

[0819] 16. A compound as defined in any of Clauses 1 to 15, wherein the oligonucleoside comprises an RNA duplex which further comprises one or more riboses modified at the 2′ position, preferably a plurality of riboses modified at the 2′ position.
[0820] 17. A compound according to Clause 16, wherein the modifications are chosen from 2′-O-methyl, 2′-deoxy-fluoro, and 2′-deoxy.
[0821] 18. A compound according to any of Clauses 1 to 17, wherein the oligonucleoside further comprises one or more degradation protective moieties at one or more ends.
[0822] 19. A compound according to Clause 18, wherein said one or more degradation protective moieties are not present at the end of the oligonucleoside strand that carries the linker/ligand moieties, and/or wherein said one or more degradation protective moieties is selected from phosphorothioate internucleoside linkages, phosphorodithioate internucleoside linkages and inverted abasic nucleosides, wherein said inverted abasic nucleosides are present at the distal end of the same strand to the end that carries the linker/ligand moieties.
[0823] 20. A compound according to any of Clauses 1 to 19, wherein said ligand moiety as depicted in Formula (I*) in Clause 1 comprises one or more ligands.
[0824] 21. A compound according to Clause 20, wherein said ligand moiety as depicted in Formula (I*) in Clause 1 comprises one or more carbohydrate ligands.
[0825] 22. A compound according to Clause 21, wherein said one or more carbohydrates can be a monosaccharide, disaccharide, trisaccharide, tetrasaccharide, oligosaccharide or polysaccharide.
[0826] 23. A compound according to Clause 22, wherein said one or more carbohydrates comprise one or more galactose moieties, one or more lactose moieties, one or more N-AcetylGalactosamine moieties, and/or one or more mannose moieties.
[0827] 24. A compound according to Clause 23, wherein said one or more carbohydrates comprise one or more N-Acetyl-Galactosamine moieties.
[0828] 25. A compound according to Clause 24, which comprises two or three N-AcetylGalactosamine moieties.
[0829] 26. A compound according to any of the preceding Clauses, wherein said one or more ligands are attached in a linear configuration, or in a branched configuration.
[0830] 27. A compound according to Clause 26, wherein said one or more ligands are attached as a biantennary or triantennary branched configuration.
[0831] 28. A compound according to Clauses 20 to 27, wherein said moiety:

[chemical structure]

[0832] as depicted in Formula (I*) in Clause 1 is any of Formulae (IV*), (V*) or (VI*), preferably Formula (IV*):

[chemical structure]

[0833] wherein:
[0834] A₁ is hydrogen, or a suitable hydroxy protecting group;
[0835] a is an integer of 2 or 3; and
[0836] b is an integer of 2 to 5; or

[chemical structure]

[0837] wherein:
[0838] A₁ is hydrogen, or a suitable hydroxy protecting group;
[0839] a is an integer of 2 or 3; and
[0840] c and d are independently integers of 1 to 6; or

[chemical structure]

[0841] wherein:
[0842] A₁ is hydrogen, or a suitable hydroxy protecting group;
[0843] a is an integer of 2 or 3; and
[0844] e is an integer of 2 to 10.
[0845] 29. A compound according to any of Clauses 1 to 28, wherein said moiety:

[chemical structure]

[0846] as depicted in Formula (I*) in Clause 1 is Formula (VII*):

[chemical structure]

[0847] wherein:
[0848] A₁ is hydrogen;
[0849] a is an integer of 2 or 3.
[0850] 30. A compound according to Clause 28 or 29, wherein a=2.
[0851] 31. A compound according to Clause 28 or 29, wherein a=3.
[0852] 32. A compound according to Clause 28, wherein b=3.
[0853] 33. A compound of Formula (VIII*):

[chemical structure]

[0854] 34. A compound of Formula (IX*):

[chemical structure]

[0855] 35. A compound according to Clause 33 or 34, wherein the oligonucleoside comprises an RNA duplex which further comprises one or more riboses modified at the 2′ position, preferably a plurality of riboses modified at the 2′ position.
[0856] 36. A compound according to Clause 35, wherein the modifications are chosen from 2′-O-methyl, 2′-deoxy-fluoro, and 2′-deoxy.
[0857] 37. A compound according to any of Clauses 33 to 36, wherein the oligonucleoside further comprises one or more degradation protective moieties at one or more ends.
[0858] 38. A compound according to Clause 37, wherein said one or more degradation protective moieties are not present at the end of the oligonucleoside strand that carries the linker/ligand moieties, and/or wherein said one or more degradation protective moieties is selected from phosphorothioate internucleoside linkages, phosphorodithioate internucleoside linkages and inverted abasic nucleosides, wherein said inverted abasic nucleosides are present at the distal end of the same strand to the end that carries the linker/ligand moieties.
[0859] 39. A compound according to Clause 33, wherein the oligonucleoside comprises an RNA duplex comprising first and second strands, wherein the first strand is at least partially complementary to an RNA sequence of a target gene, and the second strand is at least partially complementary to said first strand, and wherein each of the first and second strands have 5′ and 3′ ends, and wherein said RNA duplex is attached at the 5′ end of its second strand to the adjacent phosphate.
[0860] 40. A compound according to Clause 34, wherein the oligonucleoside comprises an RNA duplex comprising first and second strands, wherein the first strand is at least partially complementary to an RNA sequence of a target gene, and the second strand is at least partially complementary to said first strand, and wherein each of the first and second strands have 5′ and 3′ ends, and wherein said RNA duplex is attached at the 3′ end of its second strand to the adjacent phosphate.
[0861] 41. A process of preparing a compound according to any of Clauses 1 to 40, which comprises reacting compounds of Formulae (X*) and (XI*):

[chemical structure]

[0862] wherein:
[0863] r and s are independently an integer selected from 1 to 16; and
[0864] Z is an oligonucleoside moiety;
[0865] and where appropriate carrying out deprotection of the ligand and/or annealing of a second strand for the oligonucleoside.
[0866] 42. A process according to Clause 41, to prepare a compound according to any of Clauses 6, 8 to 14, 16 to 33, and 35 to 40, wherein:
[0867] compound of Formula (X*) is Formula (Xa*):

[chemical structure]

[0868] and compound of Formula (XI*) is Formula (XIa*):

[chemical structure]

[0869] wherein the oligonucleoside comprises an RNA duplex comprising first and second strands, wherein the first strand is at least partially complementary to an RNA sequence of a target gene, and the second strand is at least partially complementary to said first strand, and wherein each of the first and second strands have 5′ and 3′ ends, and wherein said RNA duplex is attached at the 5′ end of its second strand to the adjacent phosphate.
[0870] 43. A process according to Clause 41, to prepare a compound according to any of Clauses 5, 7, 9 to 13, 15 to 32, and 34 to 40, wherein:
[0871] compound of Formula (X*) is Formula (Xb*):

[chemical structure]

[0872] and compound of Formula (XI*) is Formula (XIa*):

[chemical structure]

[0873] wherein the oligonucleoside comprises an RNA duplex comprising first and second strands, wherein the first strand is at least partially complementary to an RNA sequence of a target gene, and the second strand is at least partially complementary to said first strand, and wherein each of the first and second strands have 5′ and 3′ ends, and wherein said RNA duplex is attached at the 3′ end of its second strand to the adjacent phosphate.
[0874] 44. A process according to Clauses 42 or 43, wherein:
[0875] compound of Formula (XIa*) is Formula (XIb*):

[chemical structure]

[0876] 45. A compound of Formula (X*):

[chemical structure]

[0877] wherein:
[0878] r is independently an integer selected from 1 to 16; and
[0879] Z is an oligonucleoside moiety.
[0880] 46. A compound of Formula (Xa*):

[chemical structure]

[0881] 47. A compound of Formula (Xb*):

[chemical structure]

[0882] 48. A compound of Formula (XI*):

[chemical structure]

[0883] wherein:
[0884] s is independently an integer selected from 1 to 16; and
[0885] Z is an oligonucleoside moiety.
[0886] 49. A compound of Formula (XIa*):

[chemical structure]

[0887] 50. A compound of Formula (XIb*):

[chemical structure]

[0888] 51. Use of a compound according to any of Clauses 45 and 48 to 50, for the preparation of a compound according to any of Clauses 1 to 40.
[0889] 52. Use of a compound according to Clause 46, for the preparation of a compound according to any of Clauses 6, 8 to 14, 16 to 33, and 35 to 40.
[0890] 53. Use of a compound according to Clause 47, for the preparation of a compound according to any of Clauses 5, 7, 9 to 13, 15 to 32, and 34 to 40.
[0891] 54. A compound or composition obtained, or obtainable by a process according to any of Clauses 41 to 44.
[0892] 55. A pharmaceutical composition comprising of a compound according to any of Clauses 1 to 40, together with a pharmaceutically acceptable carrier, diluent or excipient.
[0893] 56. A compound according to any of Clauses 1 to 40, for use in therapy.

### EXAMPLES

[0894] The invention will be more fully understood by reference to the following examples. They should not, however, be construed as limiting the scope of the invention. It is understood that the examples and embodiments described herein are for illustrative purposes only and that various modifications or changes in light thereof will be suggested to persons skilled in the art and are to be included within the spirit and purview of this application and scope of the appended claims.

### Example 1—Target Identification

### BACKGROUND

[0895] Genome-wide association (GWAS) studies aim to discover statistical associations between inherited variations in chromosomal DNA (genotypes) and the physical or functional characteristics of individuals (phenotypes). There are several kinds of genetic variability of which the most commonly studied in GWAS are single nucleotide polymorphisms (SNPs) where individual nucleotides in the background DNA sequence of the genome may vary between individuals. These SNPs can result in changes in gene or protein function. This can occur either directly (in the coding regions of genes) or indirectly (through effects on gene regulation). The mapping between SNPs and genes is not always 1:1 but can be many to one or one to many. GWAS studies have been used in drug discovery to identify genes whose variation is correlated (either positively or negatively) with the risk of developing particular diseases such as type 2 diabetes, or atherosclerosis; or with particular outcomes consequent on those diseases e.g. stroke or myocardial infarction. Occasionally, where most of the risk is concentrated in a single variant, or where multiple variants map to a single gene, the identification of such a gene can yield a clinically useful drug target. But this is the exception rather than the rule.

[0896] In complex (multifactorial) diseases such as diabetes a more typical outcome of a GWAS analysis is a long list of genes estimated to be correlated with the disease under investigation but where each gene carries only a very small portion of the risk. How to use these long lists of weakly associated genes to elucidate biological mechanisms and drive drug target discovery is the core problem being addressed. In addition, there is typically considerable uncertainty around the mapping of the underlying weakly correlated SNPs to their associated gene or genes; and of the relationship between genes such that the underlying biology is consequently opaque. In such situations the identification of clinically viable drug targets is extremely challenging and usually fails.

[0897] The inventors have developed a proprietary computational approach to analysing such ‘noisy’ GWAS (and other ‘omic) gene lists (that may contain hundreds of weakly correlated genes and many mapping errors) using network analysis approaches to identify the underlying biology driving complex disease risk and find drug targets that are otherwise undiscoverable by conventional methods.

[0898] To achieve this, the inventors employ proprietary network analysis approaches that allow them to allocate multiple genes to a smaller number of driver processes; and to mine these processes for impactful drug targets.

[0899] As stated above, the approach takes advantage of information that is usually ignored in standard analyses—the known and predicted (using proprietary methods) interactions between genes (and proteins) and the prediction of ‘hidden players’—other genes with which the GWAS (or other ‘omics) gene sets also interact.

### Process for Identifying Processes and Targets

[0900] The first step is to hypothesise that the dysfunction that is correlated with ‘disease’ should not be viewed at the level of individual genes. Rather, each gene belongs to a set whose members collaborate in a co-ordinated network module of interacting proteins. The network gives rise to a biological process and it is dysfunction at the level of this process or network module that should be considered to be the driver of risk.

[0901] Each protein in the network that is impacted by the SNPs contributes a small component to the overall functional dysregulation of the network module that controls the biological process. And network modules can interact to produce dysfunction at even coarser levels of organisation.

[0902] For that, protein coding genes from a gene list were selected after fine mapping. Using an internally curated database of all possible protein-protein interactions (derived from external experimentation) and internal ‘network construction’ algorithms—a range of feasible networks were generated that include the maximum number of proteins from the list with the minimal number of imputed additional ‘hidden player’ proteins. The algorithms seek to find optimal ways to connect the protein coding genes, using paths that are constrained by the protein-protein interaction (PPI) data and imputing missing proteins according to a ‘cost function’.

[0903] This process captures the relationships between protein-coding genes in the GWAS list and adds other proteins calculated to be involved in the same process (‘Hidden Players’).

[0904] In this way multiple small effects are integrated across a network or networks to generate larger effects.

[0905] The second step is to hypothesise that the pattern of connectivity within such networks is critical in determining the impact of gene dysfunction. This information is typically not easily available and is usually ignored in conventional analyses.

[0906] The networks obtained in the first step were used and a functional enrichment analysis was carried out. The functional enrichment analysis differs from the conventional approach because it incorporates information about imputed hidden players and the connectivity pattern of the proteins in addition to overlap. That is, the relationships between protein-coding genes in the GWAS list and ‘Hidden Players’ were used to identify pathways critical for the structure of the network.

[0907] For that, an internally curated pathway database was used that defines protein sets associated with a particular biological process. These proteins sets were then tested against the networks by measuring the ‘structural impact’ that removal of common proteins would have on the network and assigning an ‘impact value’ that is dependent on the specific wiring pattern of the network. Further statistical controls were performed to ensure that any bias in the statistical properties of the proteins in the GWAS set were controlled for.

[0908] The third step is to hypothesise that the gene list associated with a dysregulated function is incomplete due to the compounded errors and uncertainties outlined above; and additionally because variations in some key proteins may not be tolerated due to their potential severity. It is therefore necessary to ‘impute’ what is missing.

[0909] In a next step, pathways that are ‘network enriched’ by the above analysis were plotted in a 2 dimensional space where each pathway is represented by a point and the proximity of the points is a measure of the similarity of the pathways (see FIG. 8). The pathway data were enhanced by a technique that uses a search algorithm and the PPI database above to add additional members that are ‘nearby in network space’ according to another cost function. This allowed pathways that may not share many proteins but which share ‘neighbours’ to be compared. Similar pathways were aggregated into clusters using an unsupervised machine learning approach. The biological function of such clusters (the processes associated with risk) were determined by expert interpretation of the pathway annotations and protein annotations.

[0910] In a further step, directed network models were reconstructed from selected clusters of pathway protein sets representing biological processes associated with disease risk using an internal proprietary database of protein-protein relationships that includes ‘direction’ of interaction. This directional information was derived from a range of public and internal databases supplemented by imputed direction from natural language processing of text from scientific publications. Network construction algorithms using these sources of information were used to build ‘directed’ models of the key biological processes.

[0911] Proprietary analytical techniques were then applied to the network models to identify pharmacologically viable targets from within the networks whose knockdown will have a significant influence on the network and by extension on the biological function being modeled. The algorithms make extensive use of directional information and hierarchical relationships to identify targets with a range of specific properties that will make them good siRNA targets. Targets were then further filtered by protein class and hepatocyte specificity according to requirements.

Identification of Key Processes and siRNA Drug Targets in Type 2 Diabetes

[0912] The inventors have used a network biology approach to create network models of Type 2 diabetes. The network models are designed to capture all of the important proteins involved in the process as well as their connections and, importantly, the direction of information flow between pairs of proteins.

[0913] The inventors have analysed these network models using proprietary analytical methods. These methods use the directional information to capture key ‘target’ properties such as whether a protein is an integrator of information, a key conduit of information to other parts of the network, an influencer of key proteins and the extent to which an influencer is influenced or influences other proteins (based on absolute and relative number and direction of inputs and outputs). The directional information also enables hierarchical relationships between proteins to be imputed. Proteins higher in the hierarchy and with certain properties may be preferred over others with otherwise similar properties. The relative specificity and magnitude of each property relative to the others made it possible for the inventors to score and rank proteins in terms of their target suitability.

[0914] The ability to characterise the properties of these targets in terms of network relationships enables judgements to be made on the selectivity and magnitude of effect in the chosen context and hence the suitability of each for a given indication.

[0915] This enabled the inventors to identify targets that will provide improved treatment of Type 2 diabetes. The analyses used for this purpose are specifically tailored to find novel and non-obvious targets whose knockdown by GalNAc-siRNA in hepatocytes will be beneficial in the treatment of diabetes. For that, the inventors leveraged a large GWAS meta-analysis of 898,930 individuals of which 9% were diabetic (Mahajan et al., Nature Genetics, 2018, 50, p 1505-1513).

[0916] From that GWAS-meta-analysis, the inventors took a list of 257 genes derived from 403 distinct association signals that were weakly correlated with risk of developing type 2 diabetes. The 257 genes were subdivided amongst the categories in FIG. 9.

[0917] Using the proprietary network analysis approach described above, the inventors were able to identify a specific biological process: ‘post-translational modification by glycosylation’ which was significantly associated with type 2 diabetes risk in both normal and obese individuals. This process was not identifiable by standard ‘functional enrichment’ approaches and was not identified by the authors of the meta-analysis (Mahajan et al., Nature Genetics, 2018, 50, p 1505-1513).

[0918] The inventors were also able to demonstrate recovery of known diabetic risk associated processes using their network aware technique and to demonstrate the increased sensitivity of this approach—see FIG. 10.

[0919] Using a number of proprietary approaches, the inventors reconstructed a network model of this process and using their analytics ranked individual hepatocyte genes according to their predicted pharmacological impact and amenability to GalNAc-mediated siRNA knockdown to identify key target genes.

[0920] This approach has enabled the inventors to identify 3 hepatocyte expressed genes coding for secreted enzyme products, of which B4GALT1 is the most highly ranked hepatocyte-expressed target in the analysis. While a number of proteins ranked in the upper quartile, only 3 also passed the selection criteria of hepatocyte expression, secretion and being an enzyme (FIG. 11).

### Example 2: Synthesis of Tether 1

### General Experimental Conditions:

[0921] Thin layer chromatography (TLC) was performed on silica-coated aluminium plates with fluorescence indicator 254 nm from Macherey-Nagel. Compounds were visualized under UV light (254 nm), or after spraying with the 5% H₂SO₄ in methanol (MeOH) or ninhydrin reagent according to Stahl (from Sigma-Aldrich), followed by heating. Flash chromatography was performed with a Biotage Isolera One flash chromatography instrument equipped with a dual variable UV wavelength detector (200-400 nm) using Biotage Sfar Silica 10, 25, 50 or 100 g columns (Uppsala, Sweden).

[0922] All moisture-sensitive reactions were carried out under anhydrous conditions using dry glassware, anhydrous solvents, and argon atmosphere. All commercially available reagents were purchased from Sigma-Aldrich and solvents from Carl Roth GmbH+Co. KG. D-Galactosamine pentaacetate was purchased from AK scientific.

[0923] HPLC/ESI-MS was performed on a Dionex UltiMate 3000 RS UHPLC system and Thermo Scientific MSQ Plus Mass spectrometer using an Acquity UPLC Protein BEH C4 column from Waters (300 Å, 1.7 μm, 2.1×100 mm) at 60° C. The solvent system consisted of solvent A with H₂O containing 0.1% formic acid and solvent B with acetonitrile (ACN) containing 0.1% formic acid. A gradient from 5-100% of B over 15 min with a flow rate of 0.4 mL/min was employed. Detector and conditions: Corona ultra-charged aerosol detection (from esa). Nebulizer Temp.: 25° C. N₂ pressure: 35.1 psi. Filter: Corona.

[0924] ¹H and ¹³C NMR spectra were recorded at room temperature on a Varian spectrometer at 500 MHz (¹H NMR) and 125 MHz (¹³C NMR). Chemical shifts are given in ppm referenced to the solvent residual peak (CDCl₃-¹H NMR: δ at 7.26 ppm and ¹³C NMR δ at 77.2 ppm; DMSO-d₆-1H NMR: δ at 2.50 ppm and ¹³C NMR δ at 39.5 ppm). Coupling constants are given in Hertz. Signal splitting patterns are described as singlet (s), doublet (d), triplet (t) or multiplet (m).

### Synthesis Route for the Conjugate Building Block TriGalNAc_Tether1:

[chemical structure]

[0926] Preparation of compound 2: D-Galactosamine pentaacetate (3.00 g, 7.71 mmol, 1.0 eq.) was dissolved in anhydrous dichloromethane (DCM) (30 mL) under argon and trimethylsilyl trifluoromethanesulfonate (TMSOTf, 4.28 g, 19.27 mmol, 2.5 eq.) was added. The reaction was stirred at room temperature for 3 h. The reaction mixture was diluted with DCM (50 mL) and washed with cold saturated aq. NaHCO₃ (100 mL) and water (100 mL). The organic layer was separated, dried over Na₂SO₄ and concentrated to afford the title compound as yellow oil, which was purified by flash chromatography (gradient elution: 0-10% MeOH in DCM in 10 CV). The product was obtained as colourless oil (2.5 g, 98%, rf=0.45 (2% MeOH in DCM)).

[chemical structure]

[0927] Preparation of compound 4: Compound 2 (2.30 g, 6.98 mmol, 1.0 eq.) and azido-PEG3-OH (1.83 g, 10.5 mmol, 1.5 eq.) were dissolved in anhydrous DCM (40 mL) under argon and molecular sieves 3 Å (5 g) were added to the solution. The mixture was stirred at room temperature for 1 h. TMSOTf (0.77 g, 3.49 mmol, 0.5 eq.) was then added to the mixture and the reaction was stirred overnight. The molecular sieves were filtered, the filtrate was diluted with DCM (100 mL) and washed with cold saturated aq. NaHCO₃ (100 mL) and water (100 mL). The organic layer was separated, dried over Na₂SO₄ and the solvent was removed under reduced pressure. The crude material was purified by flash chromatography (gradient elution: 0-3% MeOH in DCM in 10 CV) to afford the title product as light yellow oil (3.10 g, 88%, rf=0.25 (2% MeOH in DCM)). MS: calculated for C₂₀H₃₂N₄O₁₁, 504.21. Found 505.4. ¹H NMR (500 MHz, CDCl₃) δ 6.21-6.14 (m, 1H), 5.30 (dd, J=3.4, 1.1 Hz, 1H), 5.04 (dd, J=11.2, 3.4 Hz, 1H), 4.76 (d, J=8.6 Hz, 1H), 4.23-4.08 (m, 3H), 3.91-3.80 (m, 3H), 3.74-3.59 (m, 9H), 3.49-3.41 (m, 2H), 2.14 (s, 3H), 2.02 (s, 3H), 1.97 (d, J=4.2 Hz, 6H). ¹³C NMR (125 MHz, CDCl₃) δ 170.6 (C), 170.5 (C), 170.4 (C), 170.3 (C), 102.1 (CH), 71.6 (CH), 70.8 (CH), 70.6 (CH), 70.5 (CH), 70.3 (CH₂), 69.7 (CH₂), 68.5 (CH₂), 66.6 (CH₂), 61.5 (CH₂), 23.1 (CH₃), 20.7 (3×CH₃).

[chemical structure]

[0928] Preparation of compound 5: Compound 4 (1.00 g, 1.98 mmol, 1.0 eq.) was dissolved in a mixture of ethyl acetate (EtOAc) and MeOH (30 mL 1:1 v/v) and Pd/C (100 mg) was added. The reaction mixture was degassed using vacuum/argon cycles (3×) and hydrogenated under balloon pressure overnight. The reaction mixture was filtered through celite and washed with EtOAc (30 mL). The solvent was removed under reduced pressure to afford the title compound as colourless oil (0.95 g, quantitative yield, rf=0.25 (10% MeOH in DCM)). The compound was used without further purification. MS: calculated for C₂₀H₃₄N₂O₁₁, 478.2. Found 479.4.

[chemical structure]

[0929] Preparation of compound 7: Tris{[2-(tert-butoxycarbonyl)ethoxy]methyl}-methylamine 6 (3.37 g, 6.67 mmol, 1.0 eq.) was dissolved in a mixture of DCM/water (40 mL 1:1 v/v) and Na₂CO₃ (0.18 g, 1.7 mmol, 0.25 eq.) was added while stirring vigorously. Benzyl chloroformate (2.94 mL, 20.7 mmol, 3.10 eq.) was added dropwise to the previous mixture and the reaction was stirred at room temperature for 24 h. The reaction mixture was diluted with CH₂Cl₂ (100 mL) and washed with water (100 mL). The organic layer was separated and dried over Na₂SO₄. The solvent was removed under reduced pressure and the resulting crude material was purified by flash chromatography (gradient elution: 0-10% EtOAc in cyclohexane in 12 CV) to afford the title compound as pale yellowish oil (3.9 g, 91%, rf=0.56 (10% EtOAc in cyclohexane)). MS: calculated for C₃₃H₅₃NO₁₁, 639.3. Found 640.9. ¹H NMR (500 MHz, DMSO-d₆) δ 7.38-7.26 (m, 5H), 4.97 (s, 2H), 3.54 (t, 6H), 3.50 (s, 6H), 2.38 (t, 6H), 1.39 (s, 27H). ¹³C NMR (125 MHz, DMSO-d₆) δ 170.3 (3×C), 154.5 (C), 137.1 (C), 128.2 (2×CH), 127.7 (CH), 127.6 (2×CH), 79.7 (3×C), 68.4 (3×CH₂), 66.8 (3×CH₂), 64.9 (C), 58.7 (CH₂), 35.8 (3×CH₂), 27.7 (9×CH₃).

[chemical structure]

[0930] Preparation of compound 8: Cbz-NH-tris-Boc-ester 7 (0.20 g, 0.39 mmol, 1.0 eq.) was dissolved in CH₂Cl₂ (1 mL) under argon, trifluoroacetic acid (TFA, 1 mL) was added and the reaction was stirred at room temperature for 1 h. The solvent was removed under reduced pressure, the residue was co-evaporated 3 times with toluene (5 mL) and dried under high vacuum to get the compound as its TFA salt (0.183 g, 98%). The compound was used without further purification. MS: calculated for C₂₁H₂₉NO₁₁, 471.6. Found 472.4.

[chemical structure]

[0931] Preparation of compound 9: CbzNH-tris-COOH 8 (0.72 g, 1.49 mmol, 1.0 eq.) and GalNAc-PEG3-NH₂ 5 (3.56 g, 7.44 mmol, 5.0 eq.) were dissolved in N,N-dimethylformamide (DMF) (25 mL). Then N,N,N′,N′-tetramethyl-O-(1H-benzotriazol-1-yl)uronium hexafluorophosphate (HBTU) (2.78 g, 7.44 mmol, 5.0 eq.), 1-hydroxybenzotriazole hydrate (HOBt) (1.05 g, 7.44 mmol, 5.0 eq.) and N,N-diisopropylethylamine (DIPEA) (2.07 mL, 11.9 mmol, 8.0 eq.) were added to the solution and the reaction was stirred for 72 h. The solvent was removed under reduced pressure, the residue was dissolved in DCM (100 mL) and washed with saturated aq. NaHCO₃ (100 mL). The organic layer was dried over Na₂SO₄, the solvent evaporated and the crude material was purified by flash chromatography (gradient elution: 0-5% MeOH in DCM in 14 CV). The product was obtained as pale yellowish oil (1.2 g, 43%, rf=0.20 (5% MeOH in DCM)). MS: calculated for C₈₁H₁₂₅N₇O₄₁, 1852.9. Found 1854.7. ¹H NMR (500 MHz, DMSO-d₆) δ 7.90-7.80 (m, 10H), 7.65-7.62 (m, 4H), 7.47-7.43 (m, 3H), 7.38-7.32 (m, 8H), 5.24-5.22 (m, 3H), 5.02-4.97 (m, 4H), 4.60-4.57 (m, 3H), 4.07-3.90 (m 10H), 3.67-3.36 (m, 70H), 3.23-3.07 (m, 25H), 2.18 (s, 10H), 2.00 (s, 13H), 1.89 (s, 11H), 1.80-1.78 (in, 17H). ¹³C NMR (125 MHz, DMSO-d₆) δ 170.1 (C), 169.8 (C), 169.7 (C), 169.4 (C), 169.2 (C), 169.1 (C), 142.7 (C), 126.3 (CH), 123.9 (CH), 118.7 (CH), 109.7 (CH), 100.8 (CH), 70.5 (CH), 69.8 (CH), 69.6 (CH), 69.5 (CH), 69.3 (CH₂), 69.0 (CH₂), 68.2 (CH₂), 67.2 (CH₂), 66.7 (CH₂), 61.4 (CH₂), 22.6 (CH₂), 22.4 (3×CH₃), 20.7 (9×CH₃).

[chemical structure]

[0932] Preparation of compound 10: Triantennary GalNAc compound 9 (0.27 g, 0.14 mmol, 1.0 eq.) was dissolved in MeOH (15 mL), 3 drops of acetic acid (AcOH) and Pd/C (30 mg) was added. The reaction mixture was degassed using vacuum/argon cycles (3×) and hydrogenated under balloon pressure overnight. The completion of the reaction was followed by mass spectrometry and the resulting mixture was filtered through a thin pad of celite. The solvent was evaporated and the residue obtained was dried under high vacuum and used for the next step without further purification. The product was obtained as pale yellowish oil (0.24 g, quantitative yield). MS: calculated for C₇₃H₁₁₉N₇O₃₉, 1718.8. Found 1719.3.

[chemical structure]

[0933] Preparation of compound 11: Commercially available suberic acid bis(N-hydroxysuccinimide ester) (3.67 g, 9.9 mmol, 1.0 eq.) was dissolved in DMF (5 mL) and triethylamine (1.2 mL) was added. To this solution was added dropwise a solution of 3-azido-1-propylamine (1.0 g, 9.9 mmol, 1.0 eq.) in DMF (5 mL). The reaction was stirred at room temperature for 3 h. The reaction mixture was diluted with EtOAc (100 mL) and washed with water (50 mL). The organic layer was separated, dried over Na₂SO₄ and the solvent was removed under reduced pressure. The crude material was purified by flash chromatography (gradient elution: 0-5% MeOH in DCM in 16 CV). The product was obtained as white solid (1.54 g, 43%, rf=0.71 (5% MeOH in DCM)). MS: calculated for C₁₅H₂₃N₅O₅, 353.4. Found 354.3.

[chemical structure]

[0934] Preparation of TriGalNAc (12): Triantennary GalNAc compound 10 (0.35 g, 0.24 mmol, 1.0 eq.) and compound 11 (0.11 g, 0.31 mmol, 1.5 eq.) were dissolved in DCM (5 mL) under argon and triethylamine (0.1 mL, 0.61 mmol, 3.0 eq.) was added. The reaction was stirred at room temperature overnight. The solvent was removed under reduced pressure, the residue was dissolved in EtOAc (100 mL) and washed with water (100 mL). The organic layer was separated and dried over Na₂SO₄. The solvent was evaporated and the resulting crude material was purified by flash chromatography (elution gradient: 0-10% MeOH in DCM in 20 CV) to afford the title compound as white fluffy solid (0.27 g, 67%, rf=0.5 (10% MeOH in DCM)). MS: calculated for C₈₄H₁₃₇N₁₁O₄₁, 1957.1. Found 1959.6.

Conjugation of Tether 1 to a siRNA Strand: Monofluoro Cyclooctyne (MFCO) Conjugation at 5′- or 3′-End

[chemical structure]

[0935] General conditions for MFCO conjugation: Amine-modified single strand was dissolved at 700 OD/mL in 50 mM carbonate/bicarbonate buffer pH 9.6/dimethyl sulfoxide (DMSO) 4:6 (v/v) and to this solution was added one molar equivalent of a 35 mM solution of MFCO-C6-NHS ester (Berry&Associates, Cat. #LK 4300) in DMF. The reaction was carried out at room temperature and after 1 h another molar equivalent of the MFCO solution was added. The reaction was allowed to proceed for an additional hour and was monitored by LC/MS. At least two molar equivalent excess of the MFCO NHS ester reagent relative to the amino modified oligonucleotide were needed to achieve quantitative consumption of the starting material. The reaction mixture was diluted 15-fold with water, filtered through a 1.2 μm filter from Sartorius and then purified by reserve phase (RP HPLC) on an Akta Pure instrument (GE Healthcare).

[0936] Purification was performed using a XBridge C18 Prep 19×50 mm column from Waters. Buffer A was 100 mM TEAAc pH 7 and buffer B contained 95% acetonitrile in buffer A. A flow rate of 10 mL/min and a temperature of 60° C. were employed. UV traces at 280 nm were recorded. A gradient of 0-100% B within 60 column volumes was employed.

[0937] Fractions containing full length conjugated oligonucleotide were pooled, precipitated in the freezer with 3 M NaOAc, pH 5.2 and 85% ethanol and the collected pellet was dissolved in water. Samples were desalted by size exclusion chromatography and concentrated using a speed-vac concentrator to yield the conjugated oligonucleotide in an isolated yield of 40-80%.

[chemical structure]

[0938] General procedure for TriGalNAc conjugation: MFCO-modified single strand was dissolved at 2000 OD/mL in water and to this solution was added one equivalent solution of compound 12 (10 mM) in DMF. The reaction was carried out at room temperature and after 3 h 0.7 molar equivalent of the compound 12 solution was added. The reaction was allowed to proceed overnight and completion was monitored by LCMS. The conjugate was diluted 15-fold in water, filtered through a 1.2 μm filter from Sartorius and then purified by RP HPLC on an Akta Pure instrument (GE Healthcare).

[0939] RP HPLC purification was performed using a XBridge C18 Prep 19×50 mm column from Waters. Buffer A was 100 mM triethylammonium acetate pH 7 and buffer B contained 95% acetonitrile in buffer A. A flow rate of 10 mL/min and a temperature of 60° C. were employed. UV traces at 280 nm were recorded. A gradient of 0-100% B within 60 column volumes was employed.

[0940] Fractions containing full-length conjugated oligonucleotide were pooled, precipitated in the freezer with 3 M NaOAc, pH 5.2 and 85% ethanol and the collected pellet was dissolved in water to give an oligonucleotide solution of about 1000 OD/mL. The O-acetates were removed by adding 20% aqueous ammonia. Quantitative removal of these protecting groups was verified by LC-MS.

[0941] The conjugates were desalted by size exclusion chromatography using Sephadex G25 Fine resin (GE Healthcare) on an Akta Pure (GE Healthcare) instrument to yield the conjugated oligonucleotides in an isolated yield of 50-70%.

[0942] The following schemes further set out the routes of synthesis:

[chemical structure]

[chemical structure]

[chemical structure]

[chemical structure]

[chemical structure]

### Example 3: Duplex Annealing

[0943] To generate the desired siRNA duplex, the two complementary strands were annealed by combining equimolar aqueous solutions of both strands. The mixtures were placed into a water bath at 70° C. for 5 minutes and subsequently allowed to cool to ambient temperature within 2 h. The duplexes were lyophilized for 2 days and stored at −20° C.

[0944] The duplexes were analyzed by analytical SEC HPLC on Superdex™ 75 Increase 5/150 GL column 5×153-158 mm (Cytiva) on a Dionex Ultimate 3000 (Thermo Fisher Scientific) HPLC system. Mobile phase consisted of 1×PBS containing 10% acetonitrile. An isocratic gradient was run in 10 min at a flow rate of 1.5 mL/min at room temperature. UV traces at 260 and 280 nm were recorded. Water (LC-MS grade) was purchased from Sigma-Aldrich and Phosphate-buffered saline (PBS; 10×, pH 7.4) was purchased from GIBCO (Thermo Fisher Scientific).

### Example 4: Synthesis of Tether 2

### General Experimental Conditions:

[0945] Thin layer chromatography (TLC) was performed on silica-coated aluminium plates with fluorescence indicator 254 nm from Macherey-Nagel. Compounds were visualized under UV light (254 nm), or after spraying with the 5% H₂SO₄ in methanol (MeOH) or ninhydrin reagent according to Stahl (from Sigma-Aldrich), followed by heating. Flash chromatography was performed with a Biotage Isolera One flash chromatography instrument equipped with a dual variable UV wavelength detector (200-400 nm) using Biotage Sfar Silica 10, 25, 50 or 100 g columns (Uppsala, Sweden).

[0946] All moisture-sensitive reactions were carried out under anhydrous conditions using dry glassware, anhydrous solvents, and argon atmosphere. All commercially available reagents were purchased from Sigma-Aldrich and solvents from Carl Roth GmbH+Co. KG. D-Galactosamine pentaacetate was purchased from AK scientific.

[0947] HPLC/ESI-MS was performed on a Dionex UltiMate 3000 RS UHPLC system and Thermo Scientific MSQ Plus Mass spectrometer using an Acquity UPLC Protein BEH C4 column from Waters (300 Å, 1.7 μm, 2.1×100 mm) at 60° C. The solvent system consisted of solvent A with H₂O containing 0.1% formic acid and solvent B with acetonitrile (ACN) containing 0.1% formic acid. A gradient from 5-100% of B over 15 min with a flow rate of 0.4 mL/min was employed. Detector and conditions: Corona ultra-charged aerosol detection (from esa). Nebulizer Temp.: 25° C. N₂ pressure: 35.1 psi. Filter: Corona.

[0948] ¹H and ¹³C NMR spectra were recorded at room temperature on a Varian spectrometer at 500 MHz (¹H NMR) and 125 MHz (¹³C NMR). Chemical shifts are given in ppm referenced to the solvent residual peak (CDCl₃-¹H NMR: δ at 7.26 ppm and ¹³C NMR δ at 77.2 ppm; DMSO-d₆-¹H NMR: δ at 2.50 ppm and ¹³C NMR δ at 39.5 ppm). Coupling constants are given in Hertz. Signal splitting patterns are described as singlet (s), doublet (d), triplet (t) or multiplet (m).

### Synthesis Route for the Conjugate Building Block TriGalNAc_Tether2:

[chemical structure]

[0950] Preparation of compound 2: D-Galactosamine pentaacetate (3.00 g, 7.71 mmol, 1.0 eq.) was dissolved in anhydrous dichloromethane (DCM) (30 mL) under argon and trimethylsilyl trifluoromethanesulfonate (TMSOTf, 4.28 g, 19.27 mmol, 2.5 eq.) was added. The reaction was stirred at room temperature for 3 h. The reaction mixture was diluted with DCM (50 mL) and washed with cold saturated aq. NaHCO₃ (100 mL) and water (100 mL). The organic layer was separated, dried over Na₂SO₄, and concentrated to afford the title compound as yellow oil, which was purified by flash chromatography (gradient elution: 0-10% MeOH in DCM in 10 CV). The product was obtained as colourless oil (2.5 g, 98%, rf=0.45 (2% MeOH in DCM)).

[chemical structure]

[0951] Preparation of compound 4: Compound 2 (2.30 g, 6.98 mmol, 1.0 eq.) and azido-PEG3-OH (1.83 g, 10.5 mmol, 1.5 eq.) were dissolved in anhydrous DCM (40 mL) under argon and molecular sieves 3 Å (5 g) were added to the solution. The mixture was stirred at room temperature for 1 h. TMSOTf (0.77 g, 3.49 mmol, 0.5 eq.) was then added to the mixture and the reaction was stirred overnight. The molecular sieves were filtered, the filtrate was diluted with DCM (100 mL) and washed with cold saturated aq. NaHCO₃ (100 mL) and water (100 mL). The organic layer was separated, dried over Na₂SO₄ and the solvent was removed under reduced pressure. The crude material was purified by flash chromatography (gradient elution: 0-3% MeOH in DCM in 10 CV) to afford the title product as light-yellow oil (3.10 g, 88%, rf=0.25 (2% MeOH in DCM)). MS: calculated for C₂₀H₃₂N₄O₁₁, 504.21. Found 505.4. ¹H NMR (500 MHz, CDCl₃) δ 6.21-6.14 (m, 1H), 5.30 (dd, J=3.4, 1.1 Hz, 1H), 5.04 (dd, J=11.2, 3.4 Hz, 1H), 4.76 (d, J=8.6 Hz, 1H), 4.23-4.08 (m, 3H), 3.91-3.80 (m, 3H), 3.74-3.59 (m, 9H), 3.49-3.41 (m, 2H), 2.14 (s, 3H), 2.02 (s, 3H), 1.97 (d, J=4.2 Hz, 6H). ¹³C NMR (125 MHz, CDCl₃) δ 170.6 (C), 170.5 (C), 170.4 (C), 170.3 (C), 102.1 (CH), 71.6 (CH), 70.8 (CH), 70.6 (CH), 70.5 (CH), 70.3 (CH₂), 69.7 (CH₂), 68.5 (CH₂), 66.6 (CH₂), 61.5 (CH₂), 23.1 (CH₃), 20.7 (3×CH₃).

[chemical structure]

[0952] Preparation of compound 5: Compound 4 (1.00 g, 1.98 mmol, 1.0 eq.) was dissolved in a mixture of ethyl acetate (EtOAc) and MeOH (30 mL 1:1 v/v) and Pd/C (100 mg) was added. The reaction mixture was degassed using vacuum/argon cycles (3×) and hydrogenated under balloon pressure overnight. The reaction mixture was filtered through celite and washed with EtOAc (30 mL). The solvent was removed under reduced pressure to afford the title compound as colourless oil (0.95 g, quantitative yield, rf=0.25 (10% MeOH in DCM)). The compound was used without further purification. MS: calculated for C₂₀H₃₄N₂O₁₁, 478.2. Found 479.4.

[chemical structure]

[0953] Preparation of compound 7: Tris{[2-(tert-butoxycarbonyl)ethoxy]methyl}-methylamine 6 (3.37 g, 6.67 mmol, 1.0 eq.) was dissolved in a mixture of DCM/water (40 mL 1:1 v/v) and Na₂CO₃ (0.18 g, 1.7 mmol, 0.25 eq.) was added while stirring vigorously. Benzyl chloroformate (2.94 mL, 20.7 mmol, 3.10 eq.) was added dropwise to the previous mixture and the reaction was stirred at room temperature for 24 h. The reaction mixture was diluted with CH₂Cl₂ (100 mL) and washed with water (100 mL). The organic layer was separated and dried over Na₂SO₄. The solvent was removed under reduced pressure and the resulting crude material was purified by flash chromatography (gradient elution: 0-10% EtOAc in cyclohexane in 12 CV) to afford the title compound as pale yellowish oil (3.9 g, 91%, rf=0.56 (10% EtOAc in cyclohexane)). MS: calculated for C₃₃H₅₃NO₁₁, 639.3. Found 640.9. ¹H NMR (500 MHz, DMSO-d₆) δ 7.38-7.26 (m, 5H), 4.97 (s, 2H), 3.54 (t, 6H), 3.50 (s, 6H), 2.38 (t, 6H), 1.39 (s, 27H). ¹³C NMR (125 MHz, DMSO-d₆) δ 170.3 (3×C), 154.5 (C), 137.1 (C), 128.2 (2×CH), 127.7 (CH), 127.6 (2×CH), 79.7 (3×C), 68.4 (3×CH₂), 66.8 (3×CH₂), 64.9 (C), 58.7 (CH₂), 35.8 (3×CH₂), 27.7 (9×CH₃).

[chemical structure]

[0954] Preparation of compound 8: Cbz-NH-tris-Boc-ester 7 (0.20 g, 0.39 mmol, 1.0 eq.) was dissolved in CH₂Cl₂ (1 mL) under argon, trifluoroacetic acid (TFA, 1 mL) was added and the reaction was stirred at room temperature for 1 h. The solvent was removed under reduced pressure, the residue was co-evaporated 3 times with toluene (5 mL) and dried under high vacuum to get the compound as its TFA salt (0.183 g, 98%). The compound was used without further purification. MS: calculated for C₂₁H₂₉NO₁₁, 471.6. Found 472.4.

[chemical structure]

[0955] Preparation of compound 9: CbzNH-tris-COOH 8 (0.72 g, 1.49 mmol, 1.0 eq.) and GalNAc-PEG3-NH₂ 5 (3.56 g, 7.44 mmol, 5.0 eq.) were dissolved in N,N-dimethylformamide (DMF) (25 mL). Then N,N,N′,N-tetramethyl-O-(1H-benzotriazol-1-yl)uronium hexafluorophosphate (HBTU) (2.78 g, 7.44 mmol, 5.0 eq.), 1-hydroxybenzotriazole hydrate (HOBt) (1.05 g, 7.44 mmol, 5.0 eq.) and N,N-diisopropylethylamine (DIPEA) (2.07 mL, 11.9 mmol, 8.0 eq.) were added to the solution and the reaction was stirred for 72 h. The solvent was removed under reduced pressure, the residue was dissolved in DCM (100 mL) and washed with saturated aq. NaHCO₃ (100 mL). The organic layer was dried over Na₂SO₄, the solvent evaporated and the crude material was purified by flash chromatography (gradient elution: 0-5% MeOH in DCM in 14 CV). The product was obtained as pale yellowish oil (1.2 g, 43%, rf=0.20 (5% MeOH in DCM)). MS: calculated for C₈₁H₁₂₅N₇O₄₁, 1852.9. Found 1854.7. ¹H NMR (500 MHz, DMSO-d₆) δ 7.90-7.80 (m, 10H), 7.65-7.62 (m, 4H), 7.47-7.43 (m, 3H), 7.38-7.32 (m, 8H), 5.24-5.22 (m, 3H), 5.02-4.97 (m, 4H), 4.60-4.57 (m, 3H), 4.07-3.90 (m 10H), 3.67-3.36 (m, 70H), 3.23-3.07 (m, 25H), 2.18 (s, 10H), 2.00 (s, 13H), 1.89 (s, 11H), 1.80-1.78 (m, 17H). ¹³C NMR (125 MHz, DMSO-d₆) δ 170.1 (C), 169.8 (C), 169.7 (C), 169.4 (C), 169.2 (C), 169.1 (C), 142.7 (C), 126.3 (CH), 123.9 (CH), 118.7 (CH), 109.7 (CH), 100.8 (CH), 70.5 (CH), 69.8 (CH), 69.6 (CH), 69.5 (CH), 69.3 (CH₂), 69.0 (CH₂), 68.2 (CH₂), 67.2 (CH₂), 66.7 (CH₂), 61.4 (CH₂), 22.6 (CH₂), 22.4 (3×CH₃), 20.7 (9×CH₃).

[chemical structure]

[0956] Preparation of compound 10: Triantennary GalNAc compound 9 (0.27 g, 0.14 mmol, 1.0 eq.) was dissolved in MeOH (15 mL), 3 drops of acetic acid (AcOH) and Pd/C (30 mg) was added. The reaction mixture was degassed using vacuum/argon cycles (3×) and hydrogenated under balloon pressure overnight. The completion of the reaction was followed by mass spectrometry and the resulting mixture was filtered through a thin pad of celite. The solvent was evaporated, and the residue obtained was dried under high vacuum and used for the next step without further purification. The product was obtained as pale yellowish oil (0.24 g, quantitative yield). MS: calculated for C₇₃H₁₁₉N₇O₃₉, 1718.8. Found 1719.3.

[chemical structure]

[0957] Preparation of compound 14: Triantennary GalNAc compound 10 (0.45 g, 0.26 mmol, 1.0 eq.), HBTU (0.19 g, 0.53 mmol, 2.0 eq.) and DIPEA (0.23 mL, 1.3 mmol, 5.0 eq.) were dissolved in DCM (10 mL) under argon. To this mixture, it was added dropwise a solution of compound 13 (0.14 g, 0.53 mmol, 2.0 eq.) in DCM (5 mL). The reaction was stirred at room temperature overnight. The solvent was removed, and the residue was dissolved in EtOAc (50 mL), washed with water (50 mL) and dried over Na₂SO₄. The solvent was evaporated, and the crude material was purified by flash chromatography (gradient elution: 0-5% MeOH in DCM in 20 CV). The product was obtained as white fluffy solid (0.25 g, 48%, rf=0.4 (10% MeOH in DCM)). MS: calculated for C₈₈H₁₃₇N₇O₄₂, 1965.1. Found 1965.6.

[chemical structure]

[0958] Preparation of TriGalNAc (15): Triantennary GalNAc compound 14 (0.31 g, 0.15 mmol, 1.0 eq.) was dissolved in EtOAc (15 mL) and Pd/C (40 mg) was added. The reaction mixture was degassed by using vacuum/argon cycles (3×) and hydrogenated under balloon pressure overnight. The completion of the reaction was monitored by mass spectrometry and the resulting mixture was filtered through a thin pad of celite. The solvent was removed under reduced pressure and the resulting residue was dried under high vacuum overnight. The residue was used for conjugations to oligonucleosides without further purification (0.28 g, quantitative yield). MS: calculated for C₈₁H₁₃₁N₇O₄₂, 1874.9. Found 1875.3.

Conjugation of Tether 2 to a siRNA Strand: TriGalNAc Tether 2 (GalNAc-T2) Conjugation at 5′-End or 3′-End

[chemical structure]

[0959] Preparation of TriGalNAc tether 2 NHS ester: To a solution of carboxylic acid tether 2 (compound 15, 227 mg, 121 μmol) in DMF (2.1 mL), N-hydroxysuccinimide (NHS) (15.3 mg, 133 μmol) and N,N′-diisopropylcarbodiimide (DIC) (19.7 μL, 127 μmol) were added. The solution was stirred at room temperature for 18 h and used without purification for the subsequent conjugation reactions.

[0960] General procedure for triGalNAc tether 2 conjugation: Amine-modified single strand was dissolved at 700 OD/mL in 50 mM carbonate/bicarbonate buffer pH 9.6/DMSO 4:6 (v/v) and to this solution was added one molar equivalent of Tether 2 NHS ester (57 mM) solution in DMF. The reaction was carried out at room temperature and after 1 h another molar equivalent of the NHS ester solution was added. The reaction was allowed to proceed for one more hour and reaction progress was monitored by LCMS. At least two molar equivalent excess of the NHS ester reagent relative to the amino modified oligonucleoside were needed to achieve quantitative consumption of the starting material. The reaction mixture was diluted 15-fold with water, filtered once through 1.2 μm filter from Sartorius and then purified by reserve phase (RP HPLC) on an Akta Pure (GE Healthcare) instrument.

[0961] The purification was performed using a XBridge C18 Prep 19×50 mm column from Waters. Buffer A was 100 mM TEAA pH 7 and buffer B contained 95% acetonitrile in buffer A. A flow rate of 10 mL/min and a temperature of 60° C. were employed. UV traces at 280 nm were recorded. A gradient of 0-100% B within 60 column volumes was employed.

[0962] Fractions containing full-length conjugated oligonucleosides were pooled together, precipitated in the freezer with 3 M NaOAc, pH 5.2 and 85% ethanol and then dissolved at 1000 OD/mL in water. The O-acetates were removed with 20% ammonium hydroxide in water until completion (monitored by LC-MS).

[0963] The conjugates were desalted by size exclusion chromatography using Sephadex G25 Fine resin (GE Healthcare) on an Akta Pure (GE Healthcare) instrument to yield the conjugated oligonucleotides in an isolated yield of 60-80%.

[0964] The conjugates were characterized by HPLC-MS analysis with a 2.1×50 mm XBridge C18 column (Waters) on a Dionex Ultimate 3000 (Thermo Fisher Scientific) HPLC system equipped with a Compact ESI-Qq-TOF mass spectrometer (Bruker Daltonics). Buffer A was 16.3 mM triethylamine, 100 mM HFIP in 1% MeOH in H₂O and buffer B contained 95% MeOH in buffer A. A flow rate of 250 μL/min and a temperature of 60° C. were employed. UV traces at 260 and 280 nm were recorded. A gradient of 1-100% B within 31 min was employed.

[0965] The following schemes further set out the routes of synthesis:

[chemical structure]

[chemical structure]

[chemical structure]

[chemical structure]

[chemical structure]

[chemical structure]

[chemical structure]

### Example 5: Duplex Annealing

[0966] To generate the desired siRNA duplex, the two complementary strands were annealed by combining equimolar aqueous solutions of both strands. The mixtures were placed into a water bath at 70° C. for 5 minutes and subsequently allowed to cool to ambient temperature within 2 h. The duplexes were lyophilized for 2 days and stored at −20° C.

[0967] The duplexes were analyzed by analytical SEC HPLC on Superdex™ 75 Increase 5/150 GL column 5×153-158 mm (Cytiva) on a Dionex Ultimate 3000 (Thermo Fisher Scientific) HPLC system. Mobile phase consisted of 1×PBS containing 10% acetonitrile. An isocratic gradient was run in 10 min at a flow rate of 1.5 mL/min at room temperature. UV traces at 260 and 280 nm were recorded. Water (LC-MS grade) was purchased from Sigma-Aldrich and Phosphate-buffered saline (PBS; 10×, pH 7.4) was purchased from GIBCO (Thermo Fisher Scientific).

### Example 6: Alternative Synthesis Route for the Conjugate Building Block TriGalNac_Tether2

[chemical structure]

[chemical structure]

Conjugation of Tether 2 to a siRNA Strand: TriGalNAc Tether 2 (GalNAc-T2) Conjugation at 5′-End or 3′-End

### Conjugation Conditions

[chemical structure]

[0970] Pre-activation: To a solution of compound 15 (16 umol, 4 eq.) in DMF (160 μL) was added TFA-O-PFP (15 μl, 21 eq.) followed by DIPEA (23 μl, 32 eq.) at 25° C. The tube was shaken for 2 h at 25° C. The reaction was quenched with H₂O (10 μL).

[0971] Coupling: The resulting mixture was diluted with DMF (400 μl), followed by addition of oligo-amine solution (4.0 μmol in 10×PBS, pH 7.4, 500 μL; final oligo concentration in organic and aqueous solution: 4 μmol/ml=4 mM). The tube was shaken at 25° C. for 16 h and the reaction was analysed by LCMS. The resulting mixture was treated with 28% NH₄OH (4.5 ml) and shaken for 2 h at 25° C. The mixture was analysed by LCMS, concentrated, and purified by IP-RP HPLC to produce the oligonucleotides conjugated to tether 2 GalNAc.

[chemical structure]

### Example 7: Solid Phase Synthesis Method: Scale ≤1 Mol

[0972] Syntheses of siRNA sense and antisense strands were performed on a MerMade192X synthesiser with commercially available solid supports made of controlled pore glass with universal linker (Universal CPG, with a loading of 40 μmol/g; LGC Biosearch or Glen Research).

[0973] RNA phosphoramidites were purchased from ChemGenes or Hongene.

[0974] The 2′-O-Methyl phosphoramidites used were the following: 5′-(4,4′-dimethoxytrityl)-N-benzoyl-adenosine 2′-O-methyl-3′-[(2-cyanoethyl)-(N,N-diisopropyl)]-phosphoramidite, 5′-(4,4′-dimethoxytrityl)-N-acetyl-cytidine 2′-O-methyl-3′-[(2-cyanoethyl)-(N,N-diisopropyl)]-phosphoramidite, 5′-(4,4′-dimethoxytrityl)-N-isobutyryl-guanosine 2′-O-methyl-3′-[(2-cyanoethyl)-(N,N-diisopropyl)]-phosphoramidite, 5′-(4,4′-dimethoxytrityl)-uridine 2′-O-methyl-3′-[(2-cyanoethyl)-(N,N-diisopropyl)]-phosphoramidite.

[0975] The 2′-F phosphoramidites used were the following: 5′-dimethoxytrityl-N-benzoyl-deoxyadenosine 2′-fluoro-3′-[(2-cyanoethyl)-(N,N-diisopropyl)]-phosphoramidite, 5′-dimethoxytrityl-N-acetyl-deoxycytidine 2′-fluoro-3′-[(2-cyanoethyl)-(N,N-diisopropyl)]-phosphoramidite, 5′-dimethoxytrityl-N-isobutyryl-deoxyguanosine 2′-fluoro-3′-[(2-cyanoethyl)-(N,N-diisopropyl)]-phosphoramidite and 5′-dimethoxytrityl-deoxyuridine 2′-fluoro-3′-[(2-cyanoethyl)-(N,N-diisopropyl)]-phosphoramidite.

[0976] All phosphoramidites were dissolved in anhydrous acetonitrile (Honeywell Research Chemicals) at a concentration of 0.05M, except 2′-O-methyl-uridine phosphoramidite which was dissolved in DMF/MeCN (1:4, v/v). Iodine at 0.02M in acetonitrile/Pyridine/H2O (DNAchem) was used as oxidizing reagent. Thiolation for phosphorothioate linkages was performed with 0.2 M PADS (TCI) in acetonitrile/pyridine 1:1 v/v. 5-Ethyl thiotetrazole (ETT), 0.25M mM in acetonitrile was used as activator solution.

[0977] Inverted abasic phosphoramidite, 3-O-Dimethoxytrityl-2-deoxyribose-5-[(2-cyanoethyl)-(N, N-diisopropyl)]-phosphoramidite were purchased from Chemgenes (ANP-1422) or Hongene (OP-040).

[0978] At each cycle, the DMT was removed by deblock solution, 3% TCA in DCM (DNAchem).

[0979] The coupling time was 180 seconds. The oxidizer contact time was set to 80 seconds and thiolation time was 2*100 seconds.

[0980] At the end of the synthesis, the oligonucleotides were cleaved from the solid support using a NH₄OH:EtOH solution 4:1 (v/v) for 20 hours at 45° C. (TCI). The solid support was then filtered off, the filter was thoroughly washed with H₂O and the volume of the combined solution was reduced by evaporation under reduced pressure.

[0981] Oligonucleotide were treated to form the sodium salt by ultracentrifugation using Amicon Ultra-2 Centrifugal Filter Unit; PBS buffer (10×, Teknova, pH 7.4, Sterile) or by EtOH precipitation from 1M sodium acetate.

[0982] The single strands identity were assessed by MS ESI- and then, were annealed in water to form the final duplex siRNA and duplex purity were assessed by size exclusion chromatography.

### Example 8: Solid Phase Synthesis Method: Scale ≥5 μmol

[0983] Syntheses of siRNA sense and antisense strands were performed on a MerMade12 synthesiser with commercially available solid supports made of controlled pore glass with universal linker (Universal CPG, with a loading of 40 μmol/g; LGC Biosearch or Glen Research) at 5 μmol scale. Sense strand destined to 3′ conjugation were sytnthesised at 12 μmol on 3-PT-Amino-Modifier C₆ CPG 500 Å solid support with a loading of 86 μmol/g (LGC).

[0984] RNA phosphoramidites were purchased from ChemGenes or Hongene.

[0985] The 2′-O-Methyl phosphoramidites used were the following: 5′-(4,4′-dimethoxytrityl)-N-benzoyl-adenosine 2′-O-methyl-3′-[(2-cyanoethyl)-(N,N-diisopropyl)]-phosphoramidite, 5′-(4,4′-dimethoxytrityl)-N-acetyl-cytidine 2′-O-methyl-3′-[(2-cyanoethyl)-(N,N-diisopropyl)]-phosphoramidite, 5′-(4,4′-dimethoxytrityl)-N-isobutyryl-guanosine 2′-O-methyl-3′-[(2-cyanoethyl)-(N,N-diisopropyl)]-phosphoramidite, 5′-(4,4′-dimethoxytrityl)-uridine 2′-O-methyl-3′-[(2-cyanoethyl)-(N,N-diisopropyl)]-phosphoramidite.

[0986] The 2′-F phosphoramidites used were the following: 5′-dimethoxytrityl-N-benzoyl-deoxyadenosine 2′-fluoro-3′-[(2-cyanoethyl)-(N,N-diisopropyl)]-phosphoramidite, 5′-dimethoxytrityl-N-acetyl-deoxycytidine 2′-fluoro-3′-[(2-cyanoethyl)-(N,N-diisopropyl)]-phosphoramidite, 5′-dimethoxytrityl-N-isobutyryl-deoxyguanosine 2′-fluoro-3′-[(2-cyanoethyl)-(N,N-diisopropyl)]-phosphoramidite and 5′-dimethoxytrityl-deoxyuridine 2′-fluoro-3′-[(2-cyanoethyl)-(N,N-diisopropyl)]-phosphoramidite.

[0987] Inverted abasic phosphoramidite, 3-O-Dimethoxytrityl-2-deoxyribose-5-[(2-cyanoethyl)-(N, N-diisopropyl)]-phosphoramidite were purchased from Chemgenes (ANP-1422) or Hongene (OP-040).

[0988] All phosphoramidites were dissolved in anhydrous acetonitrile (Honeywell Research Chemicals) at a concentration of 0.05M, except 2′-O-methyl-uridine phosphoramidite which was dissolved in DMF/MeCN (1:4, v/v). Iodine at 0.02M in acetonitrile/Pyridine/H₂O (DNAchem) was used as oxidizing reagent. Thiolation for phosphorothioate linkages was performed with 0.2 M PADS (TCI) in acetonitrile/pyridine 1:1 v/v. 5-Ethyl thiotetrazole (ETT), 0.25M mM in acetonitrile was used as activator solution.

[0989] At each cycle, the DMT was removed by deblock solution, 3% TCA in DCM (DNAchem).

[0990] For strands synthesised on universal CPG the coupling was performed with 8 eq. of amidite for 130 seconds. The oxidation time was 47 seconds, the thiolation time was 210 seconds.

[0991] For strands synthesised on 3′-PT-Amino-Modifier C6 CPG the coupling was performed with 8 eq. of amidite for 2*150 seconds. The oxidation time was 47 seconds, the thiolation time was 250 seconds.

[0992] At the end of the synthesis, the oligonucleotides were cleaved from the solid support using a NH₄OH:EtOH solution 4:1 (v/v) for 20 hours at 45° C. (TCI). The solid support was then filtered off, the filter was thoroughly washed with H₂O and the volume of the combined solution was reduced by evaporation under reduced pressure.

[0993] Oligonucleotide were treated to form the sodium salt by EtOH precipitation from 1M sodium acetate.

[0994] The single strand oligonucleotides were purified by IP-RP HPLC on Xbridge BEH C18 5 μm, 130 Å, 19×150 mm (Waters) column with an increasing gradient of B in A. Mobile phase A: 240 mM HFIP, 7 mM TEA and 5% methanol in water; mobile phase B: 240 mM HFIP, 7 mM TEA in methanol.

[0995] The single strands purity and identity were assessed by UPLC/MS ESI− on Xbridge BEH C18 2.5 μm, 3×50 mm (Waters) column with an increasing gradient of B in A. Mobile phase A: 100 mM HFIP, 5 mM TEA in water; mobile phase B: 20% mobile phase A: 80% Acetonitrile (v/v).

[0996] Sense strands were conjugated as per protocol provided in any of Examples 2, 4, 6.

[0997] Sense and Antisense strands were then annealed in water to form the final duplex siRNA and duplex purity were assessed by size exclusion chromatography.

[0998] The present invention is not intended to be limited in scope to the particular disclosed embodiments, which are provided, for example, to illustrate various aspects of the invention. Various modifications to the compositions and methods described will become apparent from the description and teachings herein. Such variations may be practiced without departing from the true scope and spirit of the disclosure and are intended to fall within the scope of the present disclosure.

### Example 9: B4GALT1 Pharmacology Study

[0999] ETX in-house computational biology analysis identified B4GALT1, encoding beta-1,4-galactosyltransferase 1, as a gene associated with Type 2 Diabetes (T2D) (see Example 1). Here we establish B4GALT1 as a potential therapeutic target for T2D. In-silico-designed GalNAc-siRNAs targeting mouse hepatic B4GALT1 were synthesized and tested to access the plausibility of the hypothesis that a significant knockdown of hepatic B4GALT1 mRNA lowers the plasma levels of LDL-c, fibrinogen, and fasting glucose.

### In Vitro Dose-Response Assay to Select Potent Molecules

[1000] In vitro dose-response assay measuring the gene knockdown in primary mouse hepatocytes (PMHs) was performed to test 20 GalNAc-siRNAs targeting hepatic B4GALT1. Primary C57BL/6 mouse hepatocytes (PMHs) were isolated fresh by two-step collagenase liver perfusion. Cells were maintained in DMEM (Gibco-11995-092) supplemented with FBS, Penicillin/Streptomycin, HEPES and L-glutamine. Cells were cultured at 37° C. in an atmosphere with 5% CO₂ in a humidified incubator. Within 2 hours post isolation, PMHs were seeded at a density of 36,000 cells/well in regular 96-well tissue culture plates. Dose response analysis in PMHs was done by direct incubation of cells in a gymnotic free uptake setting with final GalNAc-siRNA concentrations of 1000, 500, 250, 125, 62.5, 31.3, 15.6, 7.8, 3.9, 1.95 nM. In control wells, cells were incubated without GalNAc-siRNA. After 48 hr incubation, cells were harvested for RNA extraction. Total RNA was extracted using RNeasy Kit following the manufacturer's instructions (Qiagen, Shanghai, China). After reverse transcription, real-time quantitative PCR was performed using an ABI Prism 7900HT to detect the relative abundance of B4GALT1 mRNA normalized to the housekeeping gene GAPDH. The expression of the target gene in each test sample was determined by relative quantitation using the comparative Ct (ΔΔCt) method. This method measures the Ct differences (ΔCt) between target gene and housekeeping gene. The formula is as follows: ΔCt=average Ct of B4GALT1−average Ct of GAPDH, ΔΔCt=ΔCt (sample)−average ΔCt (untreated control), relative expression of target gene mRNA=2^{-ΔΔCt}. Based on the results of in vitro free uptake experiment, GalNAc-siRNAs displaying good activity were selected for EC₅₀ determination using a 10-point concentration curve (FIG. 12).

In Vivo Pharmacology with Four Selected GalNAc-siRNAs

[1001] The pharmacodynamic activity of four selected B4GALT1 GalNAc-siRNAs was measured in vivo. Twelve C57BL/6 male mice were allocated for each of GalNAc-siRNAs, ETXM619, ETXM624, ETXM628 and ETXM633. 5 mice were allocated as no-treatment control group. Mice were subcutaneously dosed with ETXMs (10 mg/kg) on day 0, defined as the day mice were first dosed, day 3 and day 7. 3 mice in each treatment group were sacrificed on day 3, day 7, day 10 and day 14. Upon termination, liver tissues and plasma samples were harvested for further analysis. Day 3 samples were used to evaluate the single dose effect of ETXMs given on day 0. Day 7 samples represent the repeat dose effect of ETXMs given on day 0 and day3. Likewise, day 10 and day 14 samples represent the repeat dose effect of ETXMs given on day 0, day 3 and day 7. 5 mice allocated as the control group were sacrificed on day 14.

### B4GALT1 Gene Knockdown in Mouse Liver

[1002] Harvested liver samples were used to measure the B4GALT1 mRNA knockdown level by RT-qPCR. Upon collection, each tissue was treated with RNAlater and stored at 4° C. overnight then at −80° C. until the further analysis. Liver tissues were homogenized with TRIZOL for RNA extraction. RNA samples, adjusted to 400 ng/L, were reverse transcribed to cDNA using FastKing RT Kit, manufactured by TIANGEN. After gDNA removal procedure, purified cDNA samples were used for RT-qPCR. RT-qPCR method and the relative mRNA expression calculations are as described above. FIG. 13 shows that all test articles exhibit >50% gene knockdown efficiency at day 3, 7, 10 and 14.

### Terminal Plasma Collection and Measurement of Plasma Biomarkers Using Biochemical Analyser

[1003] The terminal plasma samples were collected via submandibular vein after 4-5 hour fasting. Blood samples were collected in heparin sodium coated tubes then centrifuged at 7,000 g at 4° C. for 10 min to obtain plasma samples. The plasma samples were used for the measurements of AST, ALT, albumin, ALP, BUN, CREA, TBIL, glucose, total cholesterol, LDL-c, HDL-c, triglycerides and NEFA (free fatty acids) by a biochemical analyser.

### Measurement of Plasma Insulin and Fibrinogen Levels Using ELISA Kits

[1004] Blood samples were collected in K₂EDTA coated tubes then centrifuged at 7,000 g at 4° C. for 10 minutes to obtain plasma samples. The plasma insulin level was measured using Mouse Insulin ELISA kit (Mercodia, 10-1247-01) according to the manufacturer's protocol. The fibrinogen plasma level was measured using Mouse Fibrinogen Antigen Assay kit (Innovative Research, IMSFBGKTT).

### B4GALT1 Gene Silence Effect in Biomarker Modulation

[1005] The means of the untreated control group (n=5) and the day-14 treatment group comprising groups administered with ETXM619, ETXM624, ETXM628 or ETXM633 subcutaneously at day 0, day 3 and day 7 (n=3 per group, n=12 total) were tested for equality under the null hypothesis via a two-tailed t-test. Statistically significant differences in the means of efficacy biomarker readouts were detected with an 18.8% decrease in LDL-C (p<0.05); a 21.0% decrease in fasting glucose (p<0.05); and a 29.6% decrease in fibrinogen (p<0.01) (FIG. 14).

The application's sequence listing, which the Patent Office published only in electronic form, follows.

SEQUENCE LISTING (623 sequences)

SEQ ID NO: 1 - DNA, 32767 bp, Homo sapiens
  misc_feature 1..32767: note = Description of sequence: B4GALT1 gene
  source 1..32767: mol_type = genomic DNA
gaggcatgaagaaataattgtgcatgactgaggactttccagacctcccctttccttccaccagttacttactaatctcagaatccaccccccaaaatttttctgataaaaacactaccttaaagccagcccagggagacttgagccagcccagggagacctaaagtcaccacagggagatttcagctggactcttctatctccttgttggcctacctgcagtacaaagcttttcttttctcaaaaaccaggtgtcacagtattggtttctagaacattgggcagtgagtgcttttgcgctttggtcggtaacacctggatctgatttagacaatactttggacctgaagtcttaattagttgaacttttgggggattttaagaagacactaatgtattttacctgtgagaagaatctaaataatctgtggccattgggcaaactactgtggaataaaggtgcctgacaattctttgtccctcctcccatcaagaggtggagtcagccaggtgaaatggctcatgctggtaatctcagcactttgggaggccaaagcaggaagactgcgtgagctcaggagttcgagactagcctgagcaatatcgcaacatctcatctctactaaaaattttaaaattagctggacgtggaggcgcatcccggtagtcccagctactcgggaggctgaggcaggagaatcacttgagcccaggagtttgacgttatagtgacctatgatcacaccactgcactacaggctggttgataaaggaagatcctgtctaaaaaaaaaagtaaaaacaagaggccgagccagttttattccccttgaatctggcctgccctataaacttgttttaagcaaaagaatgctttagaagtgatgctaaggctgggctttcagggatctccatcttctgtatttttgaaatgctcctttttggaatgcttcctctagtttgtgaggaaacccaagcagccacatggagagtcctttgtggagagatccaagtggagaatgaaggccccatgacccaacccattctgagtttccagcccccagacagccccaactgccattcacatgagtgaagccattttggaacttccaactgtgccagtgcctcagctgacaccatgtgaggcaaagctgcccagccaactgcaaaactgcgagaaattgttgcttcaaaacagtaagttttggggtaggtgttacgctgcaatagatgactgaaataactgtctaccatgtgccgggcactatttgatgcccttctgatccatgagggtaaaaacagaaatgtaacctggcaggtgcagaagagggcgccataggagggcagaggaaggccagctgcagggagaagcagggagctggtgattctgggcagatgagcacatggatgggccaacggccaagcccccatgccagcttttggccaatcagcactgcaacttcctcctgcatttgtctcgccggatgggattaatttttcacctgacgaagtagagagtggaaaagagctggagacagtggggagaaaggttgcctgggtctgtctcactagcaccagttaatgtctggactgctggacaatgttgtcccaaaggtttctgggccatctgtattatttgtaattgactgcttctaggtgcctgtggatcaggggcagctgagactagtgctcaggcctcagtggactctgcaagttcctgagggataggcaatcagcaagtgttgttccttttcctcgatttctggccacgtgtgtcctgggacaggtctgtgattcttaataacccccgcagtcctgtctcctggctatcatctataccaatggaagacacatccccatttccccctccacttaattttcagttgcaggactaatctgacccaccctcactcattggccaggccgactttacccctagacacaggatgctggggtcagcttcacctttaccaactccttggagaactccactttacgttctaaactaagttagcaataatttttcccttctctccttcccacatcattaagatgatcacagtatttaaaaagtattttaacaaatatcggccgggcacggtggctcacaactgtaatcccagcactttgggaggccgaggcaggcagatcacgaggtcaaaagattgagaccattctggataacacggtgaaaccccatctctactaaaaatacaaacaaattagccgggcatggtggcaggcacctgtagtcccagctacttgggaggctgaggcaggagaatggcgtgaacccaggaggcagagcttgcagtgagccaagatcacgccactgcactccagcctgggtgacagagtgagactccgtctcaaaaaaaaaaaaaaaaaaatctaggggctgaagatacagtagtgaacaagagagaaatttcctgttctcatgaagctgattttctaatgagggaggcaagacaacagaaaataaatgcataatgttgggtagttgatatccactctgaaaaaaatcaagcaggttaaggccgggcgcggtggctcacgcctgtaatcccagcactttgggaggccgaggcgggcggatcacctgaggtcaggagtttgaaaccagcctggccaacatggtgaaatccgtctctactaaaaacacaaaaaattagcccggcgtgatggcaggcacctgtaatcccagctactcaagaggctgaggcaggagaatcgcttgaacccgggaggcagaggttgcagtgaggtgagattgcaccattgcactccaacctgggggacaaaagcaagactttgtctcaaaaaaaaaaaaaaaaaaattcaagcagtttaagcagatttgggcaggaggccattctgcataaggtagtctgaaaaggtctctgtcataaggtgacatttaagagacctgaattgaatgaaatattggggacaagtgtttcaggctaaatgaacagcaagtacaaaggccctgaggcaggaagaaatatggcaagttcaaggaatagctatcaggctagtgtggctaaggcaggtccagcatggtagagtgacagatgtgggtggggagggaaataggaaccagattgaacagggtttctgtggatttggttctgaacaaaatggcatgatctgatttatgcttacaaagatttcctggatgctctgtggaaaacagactagggaggaggaatggaggaggtggaagcagggtgaccaattagtagctgccatataacccagggcaagatgatggtggcttgatcgaggatggttacatcagagttggctggtggtgaattttgatgttttgaaggtagcactgacaaagctggctgagggcttgcaaatggcattgagagcaagagaagcacatcaaggacaccttttagattctggggaactgaataaacaatagtatcactctctgagggaggtaagaacgggagtggtgtgtaaggagtaggttgctgagggcaagatgtattgtgtttgagatgccagtaaaataagcagttgaatctggaggtcagggaagagatctgggctggagacaaatcagtgatcagcatttggatattataaatcattccgaggcagtaagtgtagacacaaaagaacatcatggactatggctggggccttcagcaactggggaagaagtccagagaggagacagaaatggccagtgaagtgaggaagatcagaaggacctggtgtccaggaagtcaagtgaggaaagttgattctgtatgatcacaaccaaagtgtcaactcataagccttattttctcatctgtgaaatggacaccgtaacaccacctacttcatggcagatagtactggcacacagcaaactctcaaaataaggtagctactgttattccctgatggttggctgccagagccctcaacttccctatccacattactgacagcacctccatgagtctttctctggggtgaggtgtctctgctcactcagggcctgaggcctctgggtcaaatcgaggtcaagtggcttcagtgcctaagtctctcacccacacagccttcagcccttacttgcaaatcaacaaagggtaaacctgtagaaaacatgggtttcggagccagaattctgcctcttgccagctgtgggctcttaggaaagtttcttaatctgccggggccccactctacgacatggggagaactgctacttcatgggacagtgggtagcccagtgtagactgtaacgccggctgatctcctgcacgctggcctgggagttagaggcttcttgctgctctcctcttcaaagtatacaggactcccgccacacacacatctggaaccaagctggtctgagagccccttatagcccaggctacctgatggggaggcacagaagtggcaacccgtccactttctttgccgcaggaccccccgttaagcagcggggtccagccgggctgagttagggagggggtttcgaacgtgccactcctcgcccggcgtcgaagcccgtttcctgggtaacctttttctgcctctcttcctagcccaccaaggcccactggccagaacgccgccgcggccccaaaccactccagataaccacccgccagctgtcctctccgttctctccgccgccgcgctgcaggcccaggctcgcacccgagtcccttcgcaccccaggaagtggcgcggcctgtcgagggcagcgtggaggaggaagaggaggcgcggctcaacgcgaccgaagctccgccgcaaaggctcgggaggaagagggcggtgcgcggccaagcgtcggagctgcagtcatactccggggaccccacgacggcgccccgcccgctgcccaccctcccgaggccccgcccagcgcgcccatcccgccacgggctgccccgccttcccgccctcgtccagaaaaccccgcgcccggccccgcccccgccttcgccggggccccgcccctcccctctccgccggcgcctcgggcggcttctcgccgctcccaggtctggctggctggaggagtctcagctctcagccgctcgcccgcccccgctccgggccctcccctagtcgccgctgtggggcagcgcctggcgggcggcccgcgggcgggtcgcctcccctcctgtagcccacacccttcttaaagcggcggcgggaagatgaggcttcgggagccgctcctgagcggcagcgccgcgatgccaggcgcgtccctacagcgggcctgccgcctgctcgtggccgtctgcgctctgcaccttggcgtcaccctcgtttactacctggctggccgcgacctgagccgcctgccccaactggtcggagtctccacaccgctgcagggcggctcgaacagtgccgccgccatcgggcagtcctccggggagctccggaccggaggggcccggccgccgcctcctctaggcgcctcctcccagccgcgcccgggtggcgactccagcccagtcgtggattctggccctggccccgctagcaacttgacctcggtcccagtgccccacaccaccgcactgtcgctgcccgcctgccctgaggagtccccgctgcttggtaaggactcgggtcggcgccagtcggaggattgggacccccccggatttccccgacagggtcccccagacattccctcaggctggctcttctacgacagccagcctccctcttctggatcagagttttaaatcccagacagaggcttgggactggatgggagagaaggtttgcgaggtgggtccctggggagtcctgttggaggcgtggggccgggaccgcacagggaagtcccgaggcccctctagccccagaaccagagaaggccttggagacttccctgctgtggcccgaggctcaggaagttttggagtttgggtctgcttagggcttcgagcagccttgcactgagaactctggtagggacctcgagtaatccactcccttttggggactgacgtgaggctcccggtggggaaggagactgacctctcggttcacgtgtcttgccatagagccactctcctgagtgggtttttctcctgatcgtttgggccaagtgacttctctctgaacctcatatttctcttctgggataataaatggtcaccctttcaaggggttgttttggaagatattgtgaacaatggtaaataagggcttaattaatgagggtaagccctcagtaaattgtcactgtgtgttcatttcttcctctgtgtggatcgtgaccgagagcccttccccctagcctcctcctggtatgggtacccaaaacctaggtgagcagggatctctcccaggggcagagagcttgtgtactctgggtgttagagggctaaaatataaccagtcaacaccacgttgcccatttctggtacttccggtagcagcctgagtctcaattatcttgcccagatgatctgaactctgacctctagcctgtttcagcataggcagagagcttgagtaggtgagtttgcattcctcatagcagctggctgagcctagtctggacttctctttgacctgtaacctacaggcccacaggcccaaggcaaccacaggttgcttccagggttaccacacaggtggtttctcatttctaatgctaggttttagataattgttgtaagtgaggggccctggcaggcaggatgacatcctgccaataggagttttctgtcactttcccacagagccctggctactacatactcttgctcaatttcgccagtaattgcgtcaatgtgttcatatcaagtttgggaagaacatcttggaattggtcagacgtgaactgtggtaataatgggggcttgtttttttaagcagataattaaattcctttgcatttgatgattattctgggaagcagactagtcccataaaatgaaatggactctgccttgctgctaagtgtctgacttgagacatgctatcgagtttctcaaaatctcttccttgtgtaaaatgtggttgtcgatgattaccttacaggggtttttttaagactaaatgagatcgtgtacattaaatacaggcactcaggctgggcatggtggctcacgcctgtaatcctagcactttgggaggctgaggggagtggatcacttgaggttaggagtttgagaccagcctggccaatatggtgaaacaccatcccatctctacaaaaatacaaaaaagttagccaggggtggtggcatcgcagctactcaggaggccgaggcaggagaattgcttgaacctgggaggcagaggttgcagtgagtcaagattgtgccagtacactccagcctgggcgacgaagcaagactgtctaaaaaaaaaaaaaaaaaaaaaaatacgggcactcaatacaccgtataataataatatagtaataatatttgcttaggatctttaaaaagtttcattttttcagactcccacagaaatggctctgcacagcagagtgaagggggagagagactgagtctccaggccagaaaaaggccaggttttttgcttttgtttttagttgttgcctggatattgcacagaaagaaaaaataattagcaagttaaacaaaagtaccgcaaagttgattacattggtatttgagtatcacatcttctctcagaagcgtaagagacaaggtcgtgaccatacctctgcttagttttgttttgtaatggtgttgctagtgatcggcttgtcaccagttactggtgtttctaaatggactataattggctacttgaaaggacttcctgagaaagaacattttggaggacgaggagagagtgccttctctattttggctgctttcatgtgacatgcaagagaccatgacgtttaggctgctgctgaggcagccccagaaatgggggccgagaggtcttttcttcattttaatagggtctgtaggtttgggtggttaggtacagttctcagaatggaggttcctggctatgaggccttgagaaagctgaaagtctccttgggagtgtgtgggtggggggagtcgagcccatctgttcatgggcaggtgtcagccaaagcccttgcgggtggttttgaggttggtgggagaaagcatccgtggggtttagagttgtggccttttcactacttgcagttcctttccccgacttggctttactttctggtgtccaggggtctgggccagatgctgagattcctctcagctgacaggtgtgggttatgggcaaacccttccctggaggacataaggcaccggattggactgctgatgggttgctgttggagttgtcagggccttggaatagtcttcagatagacttgggttagtgtgacctggggcaggctgcaggtttggagccatagtaccccccgcccccacaccgggcaccctgctctgggctaatgtgaggcttgcaggagtgagtgatgcagtgggaaggggggcctttcctgaggattctacagctttctccagggaatcctcccaggtagtttaggcctgcaggtgctatgctatccttctttcctaaccctgtctcaggtcctcagcggggccatgcggcatccacttataaccctgcagcgaggccctcttttctggccacctgggtgtttgcctgctgagatgggaggaacagtggccttgggcttcttcccccgtcatgtttatctctgctcagattgggcagcagctcaatgggacttgaccagctgtggcactgccagtctgaagatgagtagggtgatggggggaggtgggcagtacctgaagctgaactggtgagagaggcaggctggcctgggggctcagctggggcctgggatggttggtacagtcccctcaggggggtaggggagtgagtgttagactgcttaagcctcagaggccgctcttgcccacctatgctttgaggagatcctcttcatttgttcaaagggaagactctgatctagagatgggcacttggaccagcaaacagcagctacaggtagccagggcacccgaggagcacttgctcatgagccggtttccctggtttttatgggggctgttgctgagcgtctgccagggtttgtgtcctagcacttgctggtctttgctgggctctcagctctcaggtgtttctctaccagcacgtttccccctccctcatatgcacacatgtggacacaagcaggctgcccaggacagagtgtactttgaggcttgggaaaggactctctctcgcccttttggggatgagccttggaacctcatcaccttccggcttggggtggagcttcatcctgggggttgaagctttaggctcagataactagtcttgtaagccagttttgtcctgttgtttttttcgtggaaaataatgtattgacgtatacacagacattctttgtctaacagtctgagattgagaaataccctccatgactatttggtttgctttcatggtgaaacttggtcgctttcttagacacagcctatggcaataagagtgatccctggctgctgtaattcattccagactttgagcaaacacaaggcaccgcctccacctgcagtggagcctctgatgaaccaaatggaaactccttggggaatggggagtaagagccaaatgtgggattggacttaaactgcagcttcttagaactgtagcattccacgatgggattgtctagtgctcttcctggaggttactattcaatagttggctagtgcacaggttcaggggtgacctgatatgccctagcgtttcagaagatccctgcaaggtgtgtcttttggtccatctgaagggtcttgtatggtgatcttgtatggatatccgtgacggctaaggcatctgataacttcattccttcagttccagcagtgttcctgtattatgctgggcactagagctacaaagaagaaaacaaagtgcctcctcttcaggaactcttaatttaggcaggggaggcataattgaacagtgctgaggtcatctaggggaaccaaagtgtgtatttatccccttccctatcactcccctccctccttcatttcttcctttcttctttcagaaactccaagttcatatcaaaattctccagccctggttttatttggttgtgtgaaaattttcctctaatttctgaagctatgcattagttctgctgagtaatctttaacttgctgctttataatgattataatgagatatcactgggtattatggtctttgggtagcagcagggtagggatttccaggctgggactaagctaatttatgggttgggaattatggggcagttaatagcaaggcagtccaagctttccacagattccaccctagggaccatccagacttaaggaacagggccggcaggctcatcccctttgcactcagctgggctatgggtgtgtgtttgtgaaagaggtttattcagtagtcatacctgctgatttccctgctatctgtttacccagtgcctcctgtaccttgtttcttactctttgttctctgctcttactatgaagaagcagagactggaattctgcttgaacccacatctacctggaaattccagtttttcttgtccagtggagcagcaatccagttgttttaggacaaatggtctgcccttgaagcttaaatcctttgagggcctggcatggtgacagttttacatttggctttggtatagactggtgtggtccctgggcagtgaggtcactgtaaggccagccagccagaccctggctcctaggggaattaacaaggcatgggattagactcacagggtccctcctgtccctaaacttggtaggggttcctgggagccagactgcgattaagattgtagagacctgagacctgagttgtaggggcctctgtgttgatctgggccattgccgggtgagctgaggcggtcactagctcaaggagtgatctcaggatattgttctgtaagtcagagacctccaggttggagagtggggcttgggggtgggggacagggtttagtggggagctggttctgggtgaatgtggcctaaagggatttgtccttagaagacagaggggtgagtcacacactcagtgcttcaggttccactttgcggcttggcctcagcccgccccttccctgcacaaatgaaggccaggggctatataattggctgttgctgaattctttggcagtgattttaaagtctggtctgggtgtgttatgtagctgcttctctatccactccccacacccgctgcttctccagagcccctcacaaagcccaggcagagagagagagagagagagagagaatgacttgcctcacagagatgttggggatagggataggggtatgggtctttgcttttgccttttgaggggggataatctcttccttcattttaaaagtaaaaagtaatgcaggctcattgaaaataatttgaaaagttgaaagagatataaaagcacacccaaattcctatcacccaaaagaaacataccggcatatttcctactagtctttttcatgtttaagaatatagctgatatatttttttttctttttctttttgagacagggtttttgctctgtcacccaggctggagtgcagtgatcacggctcactgcagcctcgacctctcgggctaagcgattctcccacttcagtctcccgagttgctgggaccacaggtgcacaccgccatgcctgactaatttttgtattttttgtagagatggggttttgccatgttgcctaggctggtctcgaactccagagctcaagtgattcacctgccttggcctcccaaagcgctgggattataggtgtcagtcaccacacccagtgttatagctgttgtctttatagatgaacagatagattgacatagattcatgtagatagcctggtgttcagcatttttcatttaagattctgtcacagacttgaccctatacctttaaaaatcacaaaggcagtatcatagtctgtcagctgaatatgccataacttaaaaaaatcattcaactgttgctgaacacacacatatacatatatagtttttgttttttcttagtgatgtagtgatgcttgtgcagaaagctttatgtactttttggatggtttctgtaggagagctttctaaaaaaggaaaaaaagtgttgaatgttttttgagaagggctagattttcaagccagtcttacaaaaggatagactcattggaaattccagatttgcttagtgctggcagatgagtatcacttattgctgaacaatgtgtctagaattctgattaaaaaagaaactaggtccaggaagtgcctgggggcaggggcaaagggccaggctgcaggataggctcttaggatctggctgagcagaaatctgctgtgaacagaatcggtgggggtgatgctttctcagtaacttctccatttgtttctttagcagctaagtccctgtgctggacttctgtggactactgtggctctggggctgtggttgtgggtgaacaacagctagctaaaccagtgctgttgacatcattgagatgtgacgcacaggaaggtgggagcaagcttgcaaatcagattctgaaacatatagcacagctctcccacctccaggtggtcctgagatctagggaggagccatagtgagaaactttaggtttctaggaattctcttagggagaagctctcttagggagaggcagaacctggttctcagttggggctgattcaggtgggttagatcaataaagcctcaggccagtgtgccaggctattcccaaggagtatactttgaagttactccctttagaatgtcctcagtggagataaattctctctgaggagcagttttgtctgccggggtcatttggcacaaagcctggagtgctagggcgaggttgcactgagggaaggggcaggattatgtcagcagtgtgacggatacagtgtgaggtcaggctccttcctgccccaccacgggggcctagaggtcatggggagggtccctggcaggggattcaatcattgcttggccccatgacagagtatattctaaaaatgccttaagtttttttctttcaaagtttcttcctgttttgcataatggccttttgcctttgacatcctgaaaccgcagagctgtcattggtgttgcaggacactgccagcttgaaaaaaatcaacaacaaaaaaagaaacaggaaaggatgtggagttcagggtgcggcctagggaagctggtatttgcgttatgggattgtggggatgtggtattaaggtgttgggtagcgcctgacatttagaggagtactctgggcagagtccctgcctgcccaagaataggtagaattgagtcttcacaccaaagtcaggagagaccccctccccccaggaagagaatgaacagggactcatttcctcattcagcaaacttttattggtaactacactatatgaagtgtgagagatagacatgaacaagagaggcccccactcttgggcagtcccttagtagtagtagatagactctggcaatatggtgtggtcagagagaggaagcctgggtgctttgagggtactgaggaggtgcagggagccaaatgggtggtctgggccagggccagagtcagaatgaaggacctctcttccagacgttgattttagcatctctgtctctcagtatgtttgaacagtctcccttattggaagggcaggagtctactgctaaaagtaacctgcgatttcctctacttgctgtcatgtggaaagaatactaaagctgaaattccaaaagttgcacacctttaccagcagggcaggagaggaaaggaaatggaggcagagtgagctgaagatgataaaagaaagagaaggtggtgcagtttggactgttatggacagaggaagtctgagggtagctggactgagggatcaaagggaggcagttgaaagggaagagagctgcagagagggatttcttggtctgcagagggtaggagcaagccttgaaggctgctggagtgaggattccgagccctggtctttattctttttctaattcattacatcattttaggcaagtcctaactcctttggtctctgttgtctttctgaaatttgagtgggctgggcctgctggtctttagcctctgtctttctctacctcctagattccagtttggcgagtgggggggaaaacctggttgtatatgcaacgtgaaaggcctctggaattccttttgaagctcactacccatgaggcttctgctaaggatttcatcatgtctgtctaagcagacataaaaattttagcaggtggatgacccgtagaaatggcacaaggaatgtttctttctgtcacactgtggtatttgatttaagaaagttgttatcctctctgtgcctcagtgttctcacttgtaaaatggcaataacagtatccacctcatagatgttatgaaatacaggtagtagccacgaaagggcttaaaacagtgcctaacacagaataagttgtgaatatatgttatttattattggtagtataatgcttatttgtgaagattttggcttttgctttataggaccttttttttttttagttgaaaatacaatgttaccatgttaaatgttaaaaaaaattctacttaccattgtaacagaacatgctcccacttctgtaacagagcttgctattacttttcaaatgcatacatattccaatgcatatattccaatgcagttgtagagtgaaactgtttgcatgcagccatttttatccaacattatcttataaaatgttatgttgtttatgattatcctaattatcttttgttgctgtctagtatccttatagatattccattagcatacactattccaggtttcactatcgtcgataatctagatatgaacatttttgtagtgtgtagctctttgcttcagttgaattactttcctgggataaattcctggggaagaatttctaggccagaggatatggtcatcttgacaatactgattcacattgctgcattgctttccaagaggtttggaatcattcacaggttctaaattggaaaatcctggcttttgaagtatgtggattctaagggcgatttggatctagctggagcctcacactgacacttccagccagtgtgtgtgtgtgtgtgtgtgtgtgtgtgtgtgtgtgtagttccctatgctggacaccgtgtgtgtgtgtgtgtgtgtgtgtgtgtgtgtgtgtgtagttccctatgctggacaccatgtggcctttctggacattagggttttcctgtgattgcctcagagcagttcctgttgaattcactctgtgtccacaaaaggagccttactgtggctctttcaacacccacctacctttgccaagttggtttacagaaagtaagaacattctttccttcttccttgatatgtggcgctaaacctatagcatggggcaggctctggctttaaaaacctgacttaaaaataatggtgttgatcaaaaagtttgtggatcagtttttggaaacactgcatgtagccatccatagaaacttatattctgttgggctagcctgggcgcctgatcatttaactcatgtggatgaacttctatgtaatagccctggtgtatgggatccagaaacagggccctaatgaagaaaggcttttaaattatgttggataaaaataagttgttacaatagcccaaagtctgcaaatatgaattgccagttctgtccttgtagtcatccaccatgtgcctgcatcttttgtagactcttgtagattcagaagcccactgaattgcataaatgatggaatgattttagacttagtgatttcagtgactaaaagtttacagatcctggccgggcacagtggctcacacccgtattcccagcactttgggaggccgaggtgggtggatcacctgaggtcaggagtttgagaccagcctggccaacatggtgaaaccttgtctctactaaaaatacaaaaattagccgggtgtggtggcatgcacctgttgtcccagctacttgggaggctgaggtgggagaatggcttgaacctgggaggcggaggttgcagtgagcccacatcaggccactgcactccagcctgggtgacagagtgagactctgtctccacctcccccgccccccgaaaaaaaaaaaagtttacagatccagcagatggggcatattcaatttgtgacagccactcccttcaccttatagctatgtcatatgtcttcttctcctttgactgcattctgcagcagtcagttgtgacttaatatggcactctgggcccactgaattaggtcagagctgctagtagtatattgttcctagagacctagggcaagattttcttactacataaaatgagggagataatttcttacctcaagatgttggtaagaggagtgaatgaggttagttatatggtaatatcagtactctgaatgtcttttgatcaatgcctaactcatcttcttgggcacaaaaggcatacagtcagcacccttaggccacatataaaattcctccaaatgcaggttttcatctgccttggggcagagtcaagagaaagaagaggaagaggcgtgaggctctgaccacaacttagggacagaatatagcccaaagcgagtaccccaggccacaaggagaaggccgctatcttgttgaatccacagcactggaaacttggagtgtgtgttcccctgtgtcagttacactggaattttatggctgctcacattcttcccttcaggtggacgttgttcatcagtatcctgggcaagaggccatcataaaccacagacagctgagtgattaggaagaggagctgaagagggagcattagatgtttgattgagtcttaggtgagaaagtatatcattaaaacaaaaagatagatgtaggcgggctcagtcttgtgtgcctggtgtgttggtagaaaaactaaagcacaagcctgtagataacctgctttattctacctcggggctggtgttggaatccaggatgccagaccctaaagtccagctctctttccaacctactgaataatccgagagaaatcatgttctctctctgggcctcagtttgcccatgtataaaatgagatgaaggattggctgggatgctctccagagtctcttcctgcctggagttctgacgtagccatgtactcctgctcagcatcgctaaatggctttgtggtaggaccattgagtgctgcctccattagggccagctatgtaatgctggggtggctgtcactgggccctaagagccaggattggtcttactggagaaatccacatccacctaaacttaagacccaggggtgtccaatcttttggcttccccaggccacactggaagaagaattgtcttggaccgcatataaaatacactaattatagccgatgaggttaaaaaaaaaaaactcaatattttaagagagttcatgaatttgtgttgagctgcattcaaagccatcctggccgcatgtggcccatgggccatcggttggacatgcttgctttagacctcccagcaattctagtctctaaacaggaaatcaaaagtcaagatgaatagataagttggtcagtgtgaaaaagtaattggtgggagccactgtagatgcagggttctaggctccatcaacaaccacctacatcactgaacgaaagataatgcttgttcagcacttattacatgccaaccatggtaaaaatacttcagatgcattgttttcatgaactctcacagcagctctttttcttgcctaaatgccccgttagaacctccagtacaatgttaaatagatatgctaagagacaacatatgtgtcttgttagggggaaaatatccagtctttgactattaagaatggtgttagcagtgggtttttcctaggtgccctttatcaggttgaggaagttcctttctattcctggtttgttgagtatttttatcatgaaaaggtgatgggttttgtcaaatgcttttctgtgtctgttgagatgatcatgtttttttgtcatttattctattgatatggtatattatacattgatttttcagatattaatcttgcatacctgggataaatcccacttggtcatggtgtataattctttttatttgttgctggattgagtttgctagtattttgttgatttgtattcataacagatagtggtctgtagtctttccctccctccctccctccctccctccctcccttccttccttcctctctctctctctctctcccctcccctcccttcttttcccctcctctcccctccccttccctttcttctctttcatagttgtttaccactgtcagaaaaggtctgttcgttttctttcgtcgtgagatctttgtttggttttggtatcagggtaatactgcctcaaaaaatgagtagggaagtgttccttcctcttctgtattttgagagagtttgtggtcggtttttattaattcttctttaaatatctggtagcgttcaccagtaaagccatctgggcctgatgttttctttgtggaaaactttttgattcctaattcagtttctggttataggtctattcagaccttctattttttcttaagtcagttttgatagtttgtgtcttccaaggagtttgcttcatctaagtcatctaatttgttggcatacatttcatagtgattccttatgatcctttttatttccgttaaagttggtgtagggatagtccctctttcattactgattataataatttgaattttctttttttcttagtcttgccaaaagcttgtcatttttattgatcttttcagaggaccaactttgagttcattatttgttctctttgttcttatttttctgcttcattaacttctctaatctttattctttcattctgcttgcttttggttaagtttgctttttctggtgtcttaaggtagaaggttaggttactgatttgagatttaaagatcatgctctttaaacgttttgatagatactgtcagtttgccctctggctttttctcattaacagtgtataggagtgcttattcctcacactcataccagccctgggtgttactaacctttatatatttgccagtatcatattcagacatagtatcttgttttaatatgtttctctgattactgatgaagttaagcaaattttcacgtgtttattggccatctgtctttcttttttcatcctttctttcaagatgggagtctttgccatgttgcccaggctggactcgaactcctgggctcaaatgatcttcctgcctcagcctcctgagtagctgggactataggcgtgagccaccatggctggcttgcccatttgtatttcttatgtgagtattttttctttttttttgaagtggagtctcactccatcccccagagtggagtgcagttgtccgatcttggctcactgcaaccaccgcctcccaggttcaagtgattctcacaccttagcctcccaagtatctgggactataggtgtgtgccaccacacctggctaatatttgtatttttagcagagatggggtttcaccatgttggccaggctggtttcaaactggcctcaagtgattcacctgcctcggcctcccaaagtgctgggattacaggtgtgagccactgtgcccagctgactttttttttcttttttttaacccttttttttttttaccctttttttggcccatttttttttaccctttttcttttaacccatttttctattagttttaaaaatatgtttgcaggagctttttatattgtggatttttcttgtttattacatatcatttgtaaatatggtctctccatctgtcactcttctttatctctggtttctttagctatgtagaagttgttatgttatgttatgttatgttatgttatgttatgttatgttatgttatgttatgttattttttggagagggagtcttgctctgtcgcccaggctggagtgcagtggtgaaatctcggctcactgcaacctctgcctcctgggttcaagcgattctcctgcctcagcttcccgagaagctgtgattacaggcacccgccaccacacccagctaatttttgtgttttagtagagacggggtttcactatgtaggtcaagctgatctcaaactcctgatctcaaatgatcctcccaaagtgctggggttacaggcgtgagccactgcactcggccagaagttttgaatttttatgtgtttaaatctatgttttcctttatgacttcaggttgctttcatacttaagcaggtcttcaccatcccaaaatgataaaatttttctcctgagttttcttctaagttggttctttagaagccaccaacttggcttcgacagcaaaagatgaacagaatttctgttcaactctcatgctgcaagaagctttatgtaatactccagggaccctttaaggtcccagagttttcctccaaatctatcagtgattctagtggctaagagtagaaatgtgaaaatttagccatgtgtgctgatagagctgtagtaatttgtaagctctgaagttctaaggagtcaggggagaagggaaagtaacatttattgaacatctattagctcaataagaacatgcgataagtatgtatatgtattatttcacttacatctgaaaggaaggcataattatccccactccttagagaaggaaattggagctggctacatttaaagtagtcctgacaccagagagatattgccaggagtacttggctggctgagtgcccagatggcccataggagtagtgggccctccacagtccaaggtctggttctaggtggagagagaaggatgtgctcgtagtcagcaccgcagctccagaaaatctgctggggctccaaaactgattagaggggcagctgactcagtaataaaactcccaggagacttacttacatactggaatgcaaagttgcagctttactgggaagattagaactgttattgagtagcttagaaatctctggctgaattcactgcaagggaagccgcaggataagctaactgctggtgagtcagcagtcagagcagggaagtgaatttaacattagatgggtcagtctctcgtggctgatgaattcatccccacaatactgtacacctgccttagggacctttgtctggactaggggttggggtccccctcctttgtacagccctggaaggacacatccagctccatccgccatctctcccttacttatttccttccttccttccttctttccatccagccatcaagcttcctttcatggccaataatcatcattggggtctactcatggactctcttgcctcatgtatttgttttattttgtcctcattcccacttctatttcccaggtatatcacaggcaactattctaacgtatttatagtttgtgtatctgtttttgctcttgccaaaatggaagccactgctttatacatagatgtattcttaactttaaaaaaaatttttttagattaacctacaataaaattggctttttggcatatagtctataaattttaacacatacatatttttgtgtatctaccaccacaatcaggatacagaacagttccatcaccccaaaaaaatccctcttgtagtcacattctcctcccacccttaatcccaggcaaccactgatctattcttcattactattgttttgtctttttgaggatgtcacataaatggagtcacacagtatatatacatttttttaaacatatgtaaatggcattttatagctcattttgattatatgtttttcatccagttctgttttttttttttatttttaaaaagtttgacataacttcagacttacagaaaagttgttagactaatacaaagaattcctggatatcctttggagtccctaaatgttaacattttactatatttactttttccttctctctctctctctctctcgctctgtgtgtgtgtgtgtgtgtgtgtgtgtgtgtgtatctacctgtagatagatagatattaatataattttagatagatgtatctagatctctctctctcatatatatgtgtgtgtgtatatatctatatctatatctatatatatctccttttacccttaaatattcagtgtatatttcctaacaacaaggtgatttaaaaatatatatataaacatagtataattaacaatcaggacatcaacattgaaacatttctgctatgtcatctacaggccttaggaagactttgtcaggtgccccaataatagccttgatggtagaagaaaaccatgtgttgtattcagttgtcatgtctcttagtgtcttgtaatctgaaataattcccaagccctttggatttcatgacagtgacattgttgaagagtacaggccagttattttgtagaaggtctctcagtttaggtctgtctgatgtttcctcctgatcagattcaggttattcacttttgacaggaataccactgaaatgatgctgagttcttctcagtgtaacgagatctagagacacacactgtcagtttgttccttattggcagtgtgaaccttgaggatttcattgtagtggcatttggcattactccattatagttactattttaccattttaaattaaaactatctggccgggcgtagtagctcatgtctgtaatcccagcactttaggaggctgaggcgggcaaattgcttgaggtcagaagtttgaaaccatcctagccaacataacatggtgaaacgccatctctataaaaaatacaaaaaattagcctggcgtggtggcgcatttgtagttccagctactcaggaggctgaggcacaaggcttgcttgagcctgggaggcggaggttgcagtgagctgaaatcacgccactgcactctagccagggtgacagagtgagactctgtctcaaaaaaaaaaagtaaataaataaaaaaattttttaagtatcttatgggcatatacttgtcctgttactcctcaaactttcatccacttttttttttttaaattttttttcttacctttcatcgttttcttgatatccactgggttttagcatctacaaatgattcttgcctgaatcagttattatggtagttgatggttttctaattccattattccttctatgtttgttaattttggcattcttctataaggaagagcttaccctttttccctattaattaattcatatattaatgcagacctatgcattcttacttcattaaatcataatcctttactatcattatgtattctgatgttcagactatcccagatttagccaataagatccccttcaggggaatggtctttgggattcctctttagaggttcctggttcctgttttcttttgacatatcctattactctttgagcatttttttttttttttttacttttaggcacagcaagaagttccatggtcctcttgttctttccccaactcagccctagagtcagtcacttctccaatgagctctagttccttttagtagagaatcataattagaaaacaagaatcagtgccaagtgtgcacctttgtttttaaggtccatccacgttgccgtgtatatgtccagcatgttgattctaactgctgaataatacctcatgattgtcatccatcccagtgtttctttttcccttctgtaatgagggactcctggactgcctccagcattaccttcacaaatattgctgtgaggaaaatccttaaacgtttcctttatgggcaacgtgtgagcatgtttatgttgattcaggggtgccagacacagctccagaatggctgcctcagtttacatttccaccagcagagcatgacaggctctgtgtctccgtgaataatcagcattaaccagcttcctattttttgccaaactaatagatgtgctaggataactctttgttttaacttgtttttctctgattaccaatgagctggagcatttcttcatatgcctgatggtctttgggattcctcttaggtaaattgcttattcattataatcctttgcctgtttttcactggagttcttatatttttcttgaagatatgcaggaattccttatacatcctagatattaatcccttcctggtctcagacattgcagatatcttctgaatctgttatttacttatttatttacaattttttttttaagagttggggttttgctctgtcacccagactggagtgcagtggtatgatcatgactcattgtggcctcgcaatcctgggcttaagcgatcctcccacctcagcctcctgagtagttgggactacaggtatgcaccaccagacttggctaattttattttattttttagagatggaagtcttaatatgttgctcaggccaatcttgaactcctggcctcaagcaatctttccacctcagcctcctgcatctattatatatatgttcactttgctcatgctgtattttgttgcaacataaaactatttttcccattgttttgtgcagtctctcaccagcactcttctttttctgtaactgtgttaatgccctttgttcttccatatgttaggtatgctggtatagttgaactctgctgactctcctcagtaaacagtctctttttatgacaccttatcctctactgaattctctctatcaagaatgacttggccgggcatgggggctcatgcctgtaatcccagcattctgggaggccgaggtgggcagatcacccgaggtcagaagttcaagaccagcccggccaacacggtgaaaccctgtctctatgaaaatacaaaaatcagctgggcgtggtggcaggtgcctgtaatcccagctacttgggaggctgaggcgggagaatcacttgaacctgagggggaggttgcagtaagccgggatggcacattgcactccagactgggtgatggagaaactccatctcagggggaaaaaaaaaaaaaaaaaaagaatgacttgtcttcctcttagagtgtgaggtctacatacaaatattattcttgtattcagcaaatgtatgtcataggcctagtgtgtgttaggaactgtgctgtcaccaacaaagtttagagaggttataaaacttgactgtagctttttagaggtggaggagtgatttgaaacctaggctgtaattccttcctcctgtgattccttcctactgtgttgccttcccttgaaaattgcatttgggggccaggtgtggtggctctcgcctgtaatcccagcactttgggaggctgaggcgggtggatcacctgaggtcaggagttcaagaccagcctggccaacatggcgaaaccccgtctttactaaaaatacaaaaattagctggatgtggtgtgtggtgacatgcacctatattcccaggtactcagtaggctgaggcaagagaatcacttgaacccaggaggcagaggctgcagtgagctgaaattgcaccactgcactccagcctgagtgacagagtgagactctgtctcaaaaaaaaaaaaaagaaaagaaagaaaattgcatttagttcctgtagactgtgtgtcaaatgtctaaatctcttctaacaaatggcctaaggaggtgcaaagcgaagcatcctcaccagcatcctgacttggcagtgaggcatgggaccctggagggagtagtggtaagtgtgactctggaattcttcctgggctacttgtcagtgactggctccagattgagaggagagcccagaggacacaggtggctgccccagcctggaggtgaaagtcttaaaataaaatgccagatgcctagaccattctaaacctttctgagaagctgaaatcatcccttctggaagcgctctagttctaaaaggacagatatacagcaagatcttcctggggctaatatggagtttataggcaagtaggcctcagaacctttccctggtagtgatatctgtgggcaggcacagtttccacactttccagaaattccagcggaaggagtgagaaggaggaatctgcccttgagtgaggaccaaagaaagcagaaattcctcttgggaatttttcctccagagaccaaacactacttgggagcttgtttactgggctttaaaagcttgtgacccccagtcactctttcttgaccccaaggctttgcatttctgtggcttccccactggacagaagtggaactgtcatgctgcctgttctggggtctcccagaggtttccccatgtcctctccttgcttctactgccccacagaattggggatctgtgaccacatatggtatagaattaatgcttgagaatggtttagttcagtgatgtcaaataagattcacttttatgccacctccatcagttgaaggcccccctggcccctaaattggaaaagattctgagacagaatccccgtgggtacagcgcagggacagtaaaggcacgtgtgctgtgatttgctatccactgtgtggatgcatccaggaatatcagaaccctggaagattatttaaggggaagttaggacagcttttttgccaatccaagggtgttcttgaggaagtctgtcttcctgtatggccttcagtttctttcctgtgtaaccatggggccaacacataattcccacagctctattggcccttgtctgccaggattctctagggtctgattcgaggtggatcctggccctttgaggtggcagaatctgatcatggtgctgtttccttagatttaggccttgatacccttggcgagagcatcctgggctgagtgaccacctgaggtttttctggtgattttgtgacccatgtaaaactttgagctttgggattattctctcaaggaaatagtgacatttggtgaagagcctgtttggtgtggctatgtgaggcttagccaagaaaatgcaccatttttattaggaggttaggccatccgttgccacaaagtgtcagatgctaggcctagagcctggagaaaacttattttaaaattgatggggtgctggaggggttggggggtggtggctgtagctcatgaatcaggtgctaaacctagaaacaaaaggcctcatgtggcagactgtttctgagcacagatgaatggatgagcaactggcgcaactttgcccagttggtccagcttcccacttggccacctaggcttgctgtgaagacctcgtctggcagaaatgagagtgtttttgccccatcttgatcttaactgtaatttaagactaaaatcttagattctaaaacatcaaaggcaagatggctcccagctctgtgagctcagcttctcacctcttagttgaacaagtgcagtgtgggtcaatacatgattgctgctcttgctgccaggaactgtcccagcatagaaaggaatgggacacaatccctgccgtcaagattctaagggaggaagcaggcaggtcgactggtgcctcatctctgcagggctccagccaaggtttgtgaaggattttgcaggcatatggagtggggactgattgatcccgagaggggactggggaaagctctgaagaggggatgacatttggtttgaactccaaaaaatggttgctttacctgtttcctgaagtttttgaggtggcttataagaacatataccataaaaaggaccaatataaatttaaaatcagaaaaagagaaaatgggctgggcatggtggctcatgcctgtaatcccagcactttgggaggccaaggtgggtggatcgtgaggtcaggagatcgagaccatcctgcctggccaacatggtgaaaccccggctctactaaaaatacaaaaaattagctgggtgtggtggcacatgcctgtagtcccacctacttgggaggctgaggcaggagaatcgcttgaaacctgggaggcggaggttgcagtgagctgagatcgcaccactgcactccagcctgggcgacagagtgagactcctcctcaaaaataaataaataaagagaaaatggaacttagaaaattaagaggaagagtgaaaaggtagatatttagtcaggcacagtggctcatgcctgtaatcccaacactttgggaggccaagacaggaaaatctcttgagaccaggagcttgagacttgcctggcaacatctcaggtgagaccttatctctacaaaaaatttaaaaattagctgagctgtgtggctcgtgactgtgatcccagctactcaggaggccgagaccacagcccaggaggatcgcttgggcccagcagtttgaggctgcagtgagctggcaccactgcaattcagcctgggctacagagcaagacccagtttaaaaaaaaaaaaaaagatattcaaaccatgggtcccaacgtagttattatatttgaccatttgcaaaagctgaaagcaaaacatgttacacattttcagagaggaaaatacacagtagttcctgagtgtaagttgtttttcttgacctcattcttaaattgcttcatgagggtgggagggaagtggtagttaataagtgaacctgtaaaccagcgtttctcaaaatgtagtccagggaattgcatcaaaattgcagttacctacagtgcttgttaaaatgcagattcctgggcccctgccccaggcttatcaaatcaatctggtgagtaggactcaagaacctgtaaattcacatacttctgcagatgattcttcttgcactgcacagcatgaaagcctctgcaatagacagaaagctaccagcattgcgaaagcaacttgagtgcttggcctttgaaggttgagtgggactttaatgagggagagagtaaggcatgagaaatggcagttccactgaggtcagtcagtggttcattgctgacgaagtcacttttaagtcatgttttagaagaactaccaagtgtggcaggtcaggcatgtggcaggactgtttctgagcacagatgaatggatgagcacctggccccactgtgcccagttggtctagcttcccacttggccacctacggtctgctgtgtggaccttgtctggcagtctcctttaatttattttttattatttttttctttttgagatggagtcttgctttgttgcccaggctagagtgcagtggcatgatctcggctcactgcagcctccacttcccaggttccagcgattctcctgcctcagcctcccaggtagctgggatcacaggcaagtgccaccacgcccagctaatttttgtatttttaatagagacatggttttaccatgttggccaggctggtctcgaactcctgacctcaggtgatccacccatctcagcctcccaaaatgctggaattacaggtgtgagccaccgcacctggcctattttttttcagcaaattctttgtttttctctctgttcccaaatgcagggtactgagaccacagatgtattctgtttcctgttgaaaaaatgtttctcacttagctgggtgtggtagcatgcactgcagtcccacgggaggctgaggcgagaggattgcttgagcccaggagttcgataatcatgccattgcactctggtctgggtaacagagcgagaaactgtctcttaaaaaaaagaaaaagaaaaagaggtcctagggaaagaaacaaatagtggcttggatggtgagttggtggaaagaacagtgggtgttgggggtgttgaacttgtgtttgtgtgtggtgtacccaagacatatcatgtcagcattaagaatagactattcctgttttctggtcactgagttgtatgttttgacatccttattttggaagatacttccttactaggaatgggatagggagggggtcacctttcccatctgtgggtcatattttaaaatatttattgttcaagtttaaagatataaccaaaggtataaagaaaaataccacaaacatctgatttaagaaacaaaccagccgagcgcggtggctcgtgcctgtaatcccagcactgtgggaggccgaggcaggcagatcatgaggtcaagagatcgagaccatcctggccaacatggtgaaaccccgtctctactgaaaatacaaaaattaactggtcatggtggtgtgtgcctgtagtcccagctactcgggaggctgtggcaggagaatcgcttgaacccaggaggcggaggttgtagtgagccaagattgtgccactgcattctagcctggcgacagagtgagactccgtctcaaaaagaaaaaaaaaagaaagaaatcatttcctacaccttcgaagccttcatgagttagattttgaaacagtgcaaaatgcttcacgtgagaatcgagagtcccttctggtggctctccatcccctgctcttctgtcaggttttcttgtaggtttatggaaacctttgttacttgtgcaggtggcagagaagcagagaggatagctgcgcgccacccacacagctaggatttattggcgtactcccacgtgcatggcagccaagtggacacaactctgtgatgaatcctcccaagagaactgaggggccctgatggaggagctgcttctttgcaaagctttccttgactctcttcctgtcccctagttgattccccttctgtgctagttttagcttattgtttgttacctgtcacacttagcagtactgttggctttgctggtctccttgactactgggggtaaagaccttttgttgttgttgttgagacagagtcttgctctgtcgcccaggctggagtgcaatggcgtgatttcggctcactgcaaccttcacctcccaggttcaagagattctcctgcctcagcctcctaagtagctgggattacagctacaccacacccggttaatttttgtatttttaatagagatggggtttagtagagatggggtttcaccatgttggccaggctggtctcaagcccctgacctcaaggtgacctgcctgtctcagcctcccaaagtgctgggattacagacatgagccaccatgcccagcctcaaagacctcttctttacttgctcaccctgccgcccactcccctaccaacccctgcatgccctataccacctggcacatgatacatactaactgggtacatgtttgaatatgaatggatgtggtgctgtgaatgcttaggggaagtgggtgaaatgcttaagaaccaaccttgagtggtctgggaaggcttcctgggagggtggtgtttgagctaaggccaggcagctgttagatttgttagactgaagcccttgcagacttagagagcttgtgctcttcccagaatgacgggtgagccacgtacagtaaatggtgcttctcatttctagcccaaggggcctcaaggggcaccgtgatttcacgagaatgctgcaagcaaatcttttctcaagctggggaatttggtggtaatgcctggctcagcttgcggtgcgcacctggcctttggaagattggtacagagagaagcggcccatccacatgagcctgtggaacagcactggtgggggagctgatttgtgaagaggggctgtgcagtgtactgtcaggtctgagacccaggaagaaattccagtatcccagctctcagaatcacagagttctaggcactgcctagttccacgtgttcccaaatgtttcctgaatacttggatttcctgtccagagaattttcaaaacaaacttagaggcctgacccatggctgccaaggaaggattttttttttaaattaaattttaaaaatcagtccagcatgaaaatctatgatgatttcataagagaaaggacattttaatattcaaagagtaagaagcacttaatcttggaagaaagggcattcctatactttgattacctttagtttaattaaaaaacacctacatggtctttacttctgtgatttcattcctgggctagtgaaacattgtcacaataaagcatcaggccaacgcttctttcgacccactggccaatcagttgacaaacagtgactagatgtttcagcctattttgctgaggctaaaggattgaactagtgcttcagccagcatgaaaaccagtcaggagtccgtgctggtgttggcttagattagcagggcctttgatggaggggcatgtatgtgtttgggtttgctgtgccaggcaggggagcagtggaatttgtctgaattgagctcacacattgaagttattgagcgacttacatgcaaggccatgacctggactcccagccgagaggcccacgtggcggggcttgagctgggggagccgaggacagcttacatctgctcatctgcttacgtaaccctgcctcccagcttccagagccaagaaaacacacaagccagcccagcggggccgagagcctgtggtagcacacgccatgcgccgcacagcaagggcgccttggctcggcttgaggcctgtcatgaagccctcagccctctgcctcctcccagagcttctccccaccaccccaggcagtggctctgaaacctggtcgcaggtctgcatgattctgaacagaggtagtcgttgccttcctggagtctgagctctctggagtttctcactgggacagagccaggtgtgtagcagagcatggtccctgcagtatggcaggaggtgtg

SEQ ID NO: 2 - RNA, 19 nt, Homo sapiens
  misc_feature 1..19: note = Description of sequence: B4GALT1 mRNA target sequences; starting position on NM_001497.4: 2210
  source 1..19: mol_type = mRNA
cttgaatttcctatgtatt

SEQ ID NO: 3 - RNA, 19 nt, Homo sapiens
  misc_feature 1..19: note = Description of sequence: B4GALT1 mRNA target sequences; starting position on NM_001497.4: 1068
  source 1..19: mol_type = mRNA
aatggatttcctaataatt

SEQ ID NO: 4 - RNA, 19 nt, Homo sapiens
  misc_feature 1..19: note = Description of sequence: B4GALT1 mRNA target sequences; starting position on NM_001497.4: 1016
  source 1..19: mol_type = mRNA
tcagtattttggaggtgtc

SEQ ID NO: 5 - RNA, 19 nt, Homo sapiens
  misc_feature 1..19: note = Description of sequence: B4GALT1 mRNA target sequences; starting position on NM_001497.4: 1070
  source 1..19: mol_type = mRNA
tggatttcctaataattat

SEQ ID NO: 6 - RNA, 19 nt, Homo sapiens
  misc_feature 1..19: note = Description of sequence: B4GALT1 mRNA target sequences; starting position on NM_001497.4: 2212
  source 1..19: mol_type = mRNA
tgaatttcctatgtatttt

SEQ ID NO: 7 - RNA, 19 nt, Homo sapiens
  misc_feature 1..19: note = Description of sequence: B4GALT1 mRNA target sequences; starting position on NM_001497.4: 1301
  source 1..19: mol_type = mRNA
gctggatgtacagagatac

SEQ ID NO: 8 - RNA, 19 nt, Homo sapiens
  misc_feature 1..19: note = Description of sequence: B4GALT1 mRNA target sequences; starting position on NM_001497.4: 3448
  source 1..19: mol_type = mRNA
ccaaagtgccttaaaagaa

SEQ ID NO: 9 - RNA, 19 nt, Homo sapiens
  misc_feature 1..19: note = Description of sequence: B4GALT1 mRNA target sequences; starting position on NM_001497.4: 2202
  source 1..19: mol_type = mRNA
tatgtaaacttgaatttcc

SEQ ID NO: 10 - RNA, 19 nt, Homo sapiens
  misc_feature 1..19: note = Description of sequence: B4GALT1 mRNA target sequences; starting position on NM_001497.4: 967
  source 1..19: mol_type = mRNA
ggcacatttccgttgcaat

SEQ ID NO: 11 - RNA, 19 nt, Homo sapiens
  misc_feature 1..19: note = Description of sequence: B4GALT1 mRNA target sequences; starting position on NM_001497.4: 2203
  source 1..19: mol_type = mRNA
atgtaaacttgaatttcct

SEQ ID NO: 12 - RNA, 19 nt, Homo sapiens
  misc_feature 1..19: note = Description of sequence: B4GALT1 mRNA target sequences; starting position on NM_001497.4: 1069
  source 1..19: mol_type = mRNA
atggatttcctaataatta

SEQ ID NO: 13 - RNA, 19 nt, Homo sapiens
  misc_feature 1..19: note = Description of sequence: B4GALT1 mRNA target sequences; starting position on NM_001497.4: 1031
  source 1..19: mol_type = mRNA
tgtctctgctctaagtaaa

SEQ ID NO: 14 - RNA, 19 nt, Homo sapiens
  misc_feature 1..19: note = Description of sequence: B4GALT1 mRNA target sequences; starting position on NM_001497.4: 3449
  source 1..19: mol_type = mRNA
caaagtgccttaaaagaaa

SEQ ID NO: 15 - RNA, 19 nt, Homo sapiens
  misc_feature 1..19: note = Description of sequence: B4GALT1 mRNA target sequences; starting position on NM_001497.4: 2822
  source 1..19: mol_type = mRNA
tgaatgtgccttttaatta

SEQ ID NO: 16 - RNA, 19 nt, Homo sapiens
  misc_feature 1..19: note = Description of sequence: B4GALT1 mRNA target sequences; starting position on NM_001497.4: 2209
  source 1..19: mol_type = mRNA
acttgaatttcctatgtat

SEQ ID NO: 17 - RNA, 19 nt, Homo sapiens
  misc_feature 1..19: note = Description of sequence: B4GALT1 mRNA target sequences; starting position on NM_001497.4: 3439
  source 1..19: mol_type = mRNA
ctgacttttccaaagtgcc

SEQ ID NO: 18 - RNA, 19 nt, Homo sapiens
  misc_feature 1..19: note = Description of sequence: B4GALT1 mRNA target sequences; starting position on NM_001497.4: 1067
  source 1..19: mol_type = mRNA
caatggatttcctaataat

SEQ ID NO: 19 - RNA, 19 nt, Homo sapiens
  misc_feature 1..19: note = Description of sequence: B4GALT1 mRNA target sequences; starting position on NM_001497.4: 1015
  source 1..19: mol_type = mRNA
ttcagtattttggaggtgt

SEQ ID NO: 20 - RNA, 19 nt, Homo sapiens
  misc_feature 1..19: note = Description of sequence: B4GALT1 mRNA target sequences; starting position on NM_001497.4: 3438
  source 1..19: mol_type = mRNA
cctgacttttccaaagtgc

SEQ ID NO: 21 - RNA, 19 nt, Homo sapiens
  misc_feature 1..19: note = Description of sequence: B4GALT1 mRNA target sequences; starting position on NM_001497.4: 1071
  source 1..19: mol_type = mRNA
ggatttcctaataattatt

SEQ ID NO: 22 - RNA, 19 nt, synthetic construct
  misc_feature 1..19: note = Description of sequence: Description: B4GALT1 siRNA antisense strands (unmodified); Corresponding positions on NM_001497.4: 2210-2229
  source 1..19: mol_type = other RNA
aatacataggaaattcaag

SEQ ID NO: 23 - RNA, 19 nt, synthetic construct
  misc_feature 1..19: note = Description of sequence: Description: B4GALT1 siRNA antisense strands (unmodified); Corresponding positions on NM_001497.4: 1068-1087
  source 1..19: mol_type = other RNA
aattattaggaaatccatt

SEQ ID NO: 24 - RNA, 19 nt, synthetic construct
  misc_feature 1..19: note = Description of sequence: Description: B4GALT1 siRNA antisense strands (unmodified); Corresponding positions on NM_001497.4: 1016-1035
  source 1..19: mol_type = other RNA
gacacctccaaaatactga

SEQ ID NO: 25 - RNA, 19 nt, synthetic construct
  misc_feature 1..19: note = Description of sequence: Description: B4GALT1 siRNA antisense strands (unmodified); Corresponding positions on NM_001497.4: 1070-1089
  source 1..19: mol_type = other RNA
ataattattaggaaatcca

SEQ ID NO: 26 - RNA, 19 nt, synthetic construct
  misc_feature 1..19: note = Description of sequence: Description: B4GALT1 siRNA antisense strands (unmodified); Corresponding positions on NM_001497.4: 2212-2231
  source 1..19: mol_type = other RNA
aaaatacataggaaattca

SEQ ID NO: 27 - RNA, 19 nt, synthetic construct
  misc_feature 1..19: note = Description of sequence: Description: B4GALT1 siRNA antisense strands (unmodified); Corresponding positions on NM_001497.4: 1301-1320
  source 1..19: mol_type = other RNA
gtatctctgtacatccagc

SEQ ID NO: 28 - RNA, 19 nt, synthetic construct
  misc_feature 1..19: note = Description of sequence: Description: B4GALT1 siRNA antisense strands (unmodified); Corresponding positions on NM_001497.4: 3448-3467
  source 1..19: mol_type = other RNA
ttcttttaaggcactttgg

SEQ ID NO: 29 - RNA, 19 nt, synthetic construct
  misc_feature 1..19: note = Description of sequence: Description: B4GALT1 siRNA antisense strands (unmodified); Corresponding positions on NM_001497.4: 2202-2221
  source 1..19: mol_type = other RNA
ggaaattcaagtttacata

SEQ ID NO: 30 - RNA, 19 nt, synthetic construct
  misc_feature 1..19: note = Description of sequence: Description: B4GALT1 siRNA antisense strands (unmodified); Corresponding positions on NM_001497.4: 967-986
  source 1..19: mol_type = other RNA
attgcaacggaaatgtgcc

SEQ ID NO: 31 - RNA, 19 nt, synthetic construct
  misc_feature 1..19: note = Description of sequence: Description: B4GALT1 siRNA antisense strands (unmodified); Corresponding positions on NM_001497.4: 2203-2222
  source 1..19: mol_type = other RNA
aggaaattcaagtttacat

SEQ ID NO: 32 - RNA, 19 nt, synthetic construct
  misc_feature 1..19: note = Description of sequence: Description: B4GALT1 siRNA antisense strands (unmodified); Corresponding positions on NM_001497.4: 1069-1088
  source 1..19: mol_type = other RNA
taattattaggaaatccat

SEQ ID NO: 33 - RNA, 19 nt, synthetic construct
  misc_feature 1..19: note = Description of sequence: Description: B4GALT1 siRNA antisense strands (unmodified); Corresponding positions on NM_001497.4: 1031-1050
  source 1..19: mol_type = other RNA
tttacttagagcagagaca

SEQ ID NO: 34 - RNA, 19 nt, synthetic construct
  misc_feature 1..19: note = Description of sequence: Description: B4GALT1 siRNA antisense strands (unmodified); Corresponding positions on NM_001497.4: 3449-3468
  source 1..19: mol_type = other RNA
tttcttttaaggcactttg

SEQ ID NO: 35 - RNA, 19 nt, synthetic construct
  misc_feature 1..19: note = Description of sequence: Description: B4GALT1 siRNA antisense strands (unmodified); Corresponding positions on NM_001497.4: 2822-2841
  source 1..19: mol_type = other RNA
taattaaaaggcacattca

SEQ ID NO: 36 - RNA, 19 nt, synthetic construct
  misc_feature 1..19: note = Description of sequence: Description: B4GALT1 siRNA antisense strands (unmodified); Corresponding positions on NM_001497.4: 2209-2228
  source 1..19: mol_type = other RNA
atacataggaaattcaagt

SEQ ID NO: 37 - RNA, 19 nt, synthetic construct
  misc_feature 1..19: note = Description of sequence: Description: B4GALT1 siRNA antisense strands (unmodified); Corresponding positions on NM_001497.4: 3439-3458
  source 1..19: mol_type = other RNA
ggcactttggaaaagtcag

SEQ ID NO: 38 - RNA, 19 nt, synthetic construct
  misc_feature 1..19: note = Description of sequence: Description: B4GALT1 siRNA antisense strands (unmodified); Corresponding positions on NM_001497.4: 1067-1086
  source 1..19: mol_type = other RNA
attattaggaaatccattg

SEQ ID NO: 39 - RNA, 19 nt, synthetic construct
  misc_feature 1..19: note = Description of sequence: Description: B4GALT1 siRNA antisense strands (unmodified); Corresponding positions on NM_001497.4: 1015-1034
  source 1..19: mol_type = other RNA
acacctccaaaatactgaa

SEQ ID NO: 40 - RNA, 19 nt, synthetic construct
  misc_feature 1..19: note = Description of sequence: Description: B4GALT1 siRNA antisense strands (unmodified); Corresponding positions on NM_001497.4: 3438-3457
  source 1..19: mol_type = other RNA
gcactttggaaaagtcagg

SEQ ID NO: 41 - RNA, 19 nt, synthetic construct
  misc_feature 1..19: note = Description of sequence: Description: B4GALT1 siRNA antisense strands (unmodified); Corresponding positions on NM_001497.4: 1071-1090
  source 1..19: mol_type = other RNA
aataattattaggaaatcc

SEQ ID NO: 42 - RNA, 19 nt, synthetic construct
  misc_feature 1..19: note = Description of sequence: Description: B4GALT1 siRNA sense strands (unmodified); Corresponding positions on NM_001497.4:
  source 1..19: mol_type = other RNA
cttgaatttcctatgtatt

SEQ ID NO: 43 - RNA, 19 nt, synthetic construct
  misc_feature 1..19: note = Description of sequence: Description: B4GALT1 siRNA sense strands (unmodified); Corresponding positions on NM_001497.4:
  source 1..19: mol_type = other RNA
aatggatttcctaataatt

SEQ ID NO: 44 - RNA, 19 nt, synthetic construct
  misc_feature 1..19: note = Description of sequence: Description: B4GALT1 siRNA sense strands (unmodified); Corresponding positions on NM_001497.4:
  source 1..19: mol_type = other RNA
tcagtattttggaggtgtc

SEQ ID NO: 45 - RNA, 19 nt, synthetic construct
  misc_feature 1..19: note = Description of sequence: Description: B4GALT1 siRNA sense strands (unmodified); Corresponding positions on NM_001497.4:
  source 1..19: mol_type = other RNA
tggatttcctaataattat

SEQ ID NO: 46 - RNA, 19 nt, synthetic construct
  misc_feature 1..19: note = Description of sequence: Description: B4GALT1 siRNA sense strands (unmodified); Corresponding positions on NM_001497.4:
  source 1..19: mol_type = other RNA
tgaatttcctatgtatttt

SEQ ID NO: 47 - RNA, 19 nt, synthetic construct
  misc_feature 1..19: note = Description of sequence: Description: B4GALT1 siRNA sense strands (unmodified); Corresponding positions on NM_001497.4:
  source 1..19: mol_type = other RNA
gctggatgtacagagatac

SEQ ID NO: 48 - RNA, 19 nt, synthetic construct
  misc_feature 1..19: note = Description of sequence: Description: B4GALT1 siRNA sense strands (unmodified); Corresponding positions on NM_001497.4:
  source 1..19: mol_type = other RNA
ccaaagtgccttaaaagaa

SEQ ID NO: 49 - RNA, 19 nt, synthetic construct
  misc_feature 1..19: note = Description of sequence: Description: B4GALT1 siRNA sense strands (unmodified); Corresponding positions on NM_001497.4:
  source 1..19: mol_type = other RNA
tatgtaaacttgaatttcc

SEQ ID NO: 50 - RNA, 19 nt, synthetic construct
  misc_feature 1..19: note = Description of sequence: Description: B4GALT1 siRNA sense strands (unmodified); Corresponding positions on NM_001497.4:
  source 1..19: mol_type = other RNA
ggcacatttccgttgcaat

SEQ ID NO: 51 - RNA, 19 nt, synthetic construct
  misc_feature 1..19: note = Description of sequence: Description: B4GALT1 siRNA sense strands (unmodified); Corresponding positions on NM_001497.4:
  source 1..19: mol_type = other RNA
atgtaaacttgaatttcct

SEQ ID NO: 52 - RNA, 19 nt, synthetic construct
  misc_feature 1..19: note = Description of sequence: Description: B4GALT1 siRNA sense strands (unmodified); Corresponding positions on NM_001497.4:
  source 1..19: mol_type = other RNA
atggatttcctaataatta

SEQ ID NO: 53 - RNA, 19 nt, synthetic construct
  misc_feature 1..19: note = Description of sequence: Description: B4GALT1 siRNA sense strands (unmodified); Corresponding positions on NM_001497.4:
  source 1..19: mol_type = other RNA
tgtctctgctctaagtaaa

SEQ ID NO: 54 - RNA, 19 nt, synthetic construct
  misc_feature 1..19: note = Description of sequence: Description: B4GALT1 siRNA sense strands (unmodified); Corresponding positions on NM_001497.4:
  source 1..19: mol_type = other RNA
caaagtgccttaaaagaaa

SEQ ID NO: 55 - RNA, 19 nt, synthetic construct
  misc_feature 1..19: note = Description of sequence: Description: B4GALT1 siRNA sense strands (unmodified); Corresponding positions on NM_001497.4:
  source 1..19: mol_type = other RNA
tgaatgtgccttttaatta

SEQ ID NO: 56 - RNA, 19 nt, synthetic construct
  misc_feature 1..19: note = Description of sequence: Description: B4GALT1 siRNA sense strands (unmodified); Corresponding positions on NM_001497.4:
  source 1..19: mol_type = other RNA
acttgaatttcctatgtat

SEQ ID NO: 57 - RNA, 19 nt, synthetic construct
  misc_feature 1..19: note = Description of sequence: Description: B4GALT1 siRNA sense strands (unmodified); Corresponding positions on NM_001497.4:
  source 1..19: mol_type = other RNA
ctgacttttccaaagtgcc

SEQ ID NO: 58 - RNA, 19 nt, synthetic construct
  misc_feature 1..19: note = Description of sequence: Description: B4GALT1 siRNA sense strands (unmodified); Corresponding positions on NM_001497.4:
  source 1..19: mol_type = other RNA
caatggatttcctaataat

SEQ ID NO: 59 - RNA, 19 nt, synthetic construct
  misc_feature 1..19: note = Description of sequence: Description: B4GALT1 siRNA sense strands (unmodified); Corresponding positions on NM_001497.4:
  source 1..19: mol_type = other RNA
ttcagtattttggaggtgt

SEQ ID NO: 60 - RNA, 19 nt, synthetic construct
  misc_feature 1..19: note = Description of sequence: Description: B4GALT1 siRNA sense strands (unmodified); Corresponding positions on NM_001497.4:
  source 1..19: mol_type = other RNA
cctgacttttccaaagtgc

SEQ ID NO: 61 - RNA, 19 nt, synthetic construct
  misc_feature 1..19: note = Description of sequence: Description: B4GALT1 siRNA sense strands (unmodified); Corresponding positions on NM_001497.4:
  source 1..19: mol_type = other RNA
ggatttcctaataattatt

SEQ ID NO: 62 - RNA, 19 nt, synthetic construct
  source 1..19: mol_type = other RNA
  misc_feature 1..19: note = Description: B4GALT1 siRNA antisense strands (modified); Antisense strand ID: modified_base; Underlying base sequence: 2
  modified_base 1: mod_base = OTHER; note = 2'O-methyl-adenosine
  modified_base 2: mod_base = OTHER; note = 2'Fluoro-adenosine
  modified_base 3: mod_base = um
  modified_base 4: mod_base = OTHER; note = 2'Fluoro-adenosine
  modified_base 5: mod_base = cm
  modified_base 6: mod_base = OTHER; note = 2'Fluoro-adenosine
  modified_base 7: mod_base = um
  modified_base 8: mod_base = OTHER; note = 2'Fluoro-adenosine
  modified_base 9: mod_base = gm
  modified_base 10: mod_base = OTHER; note = 2' Fluoro-guanosine
  modified_base 11: mod_base = OTHER; note = 2'O-methyl-adenosine
  modified_base 12: mod_base = OTHER; note = 2'Fluoro-adenosine
  modified_base 13: mod_base = OTHER; note = 2'O-methyl-adenosine
  modified_base 14: mod_base = OTHER; note = 2' Fluoro-guanosine
  modified_base 15: mod_base = um
  modified_base 16: mod_base = OTHER; note = 2' Fluoro-cytidine
  modified_base 17: mod_base = OTHER; note = 2'O-methyl-adenosine
  modified_base 18: mod_base = OTHER; note = 2'Fluoro-adenosine
  modified_base 19: mod_base = gm
  misc_feature 1^2: note = phosphorothioate linkage
  misc_feature 2^3: note = phosphorothioate linkage
  misc_feature 17^18: note = phosphorothioate linkage
  misc_feature 18^19: note = phosphorothioate linkage
aatacataggaaattcaag

SEQ ID NO: 63 - RNA, 19 nt, synthetic construct
  source 1..19: mol_type = other RNA
  misc_feature 1..19: note = Description: B4GALT1 siRNA antisense strands (modified); Antisense strand ID: modified_base; Underlying base sequence: 2
  modified_base 1: mod_base = OTHER; note = 2'O-methyl-adenosine
  modified_base 2: mod_base = OTHER; note = 2'Fluoro-adenosine
  modified_base 3: mod_base = um
  modified_base 4: mod_base = OTHER; note = 2' Fluoro-guanosine
  modified_base 5: mod_base = OTHER; note = 2'O-methyl-adenosine
  modified_base 6: mod_base = OTHER; note = 2' Fluoro-guanosine
  modified_base 7: mod_base = um
  modified_base 8: mod_base = OTHER; note = 2'Fluoro-adenosine
  modified_base 9: mod_base = gm
  modified_base 10: mod_base = OTHER; note = 2' Fluoro-guanosine
  modified_base 11: mod_base = OTHER; note = 2'O-methyl-adenosine
  modified_base 12: mod_base = OTHER; note = 2'Fluoro-adenosine
  modified_base 13: mod_base = OTHER; note = 2'O-methyl-adenosine
  modified_base 14: mod_base = OTHER; note = 2' Fluoro-guanosine
  modified_base 15: mod_base = cm
  modified_base 16: mod_base = OTHER; note = 2' Fluoro-cytidine
  modified_base 17: mod_base = OTHER; note = 2'O-methyl-adenosine
  modified_base 18: mod_base = OTHER; note = 2' Fluoro-guanosine
  modified_base 19: mod_base = um
  misc_feature 1^2: note = phosphorothioate linkage
  misc_feature 2^3: note = phosphorothioate linkage
  misc_feature 17^18: note = phosphorothioate linkage
  misc_feature 18^19: note = phosphorothioate linkage
aattattaggaaatccatt

SEQ ID NO: 64 - RNA, 19 nt, synthetic construct
  source 1..19: mol_type = other RNA
  misc_feature 1..19: note = Description: B4GALT1 siRNA antisense strands (modified); Antisense strand ID: modified_base; Underlying base sequence: 2
  modified_base 1: mod_base = gm
  modified_base 2: mod_base = OTHER; note = 2'Fluoro-adenosine
  modified_base 3: mod_base = cm
  modified_base 4: mod_base = OTHER; note = 2'Fluoro-adenosine
  modified_base 5: mod_base = cm
  modified_base 6: mod_base = OTHER; note = 2' Fluoro-cytidine
  modified_base 7: mod_base = um
  modified_base 8: mod_base = OTHER; note = 2' Fluoro-cytidine
  modified_base 9: mod_base = cm
  modified_base 10: mod_base = OTHER; note = 2'Fluoro-adenosine
  modified_base 11: mod_base = OTHER; note = 2'O-methyl-adenosine
  modified_base 12: mod_base = OTHER; note = 2'Fluoro-adenosine
  modified_base 13: mod_base = OTHER; note = 2'O-methyl-adenosine
  modified_base 14: mod_base = OTHER; note = 2' Fluoro-guanosine
  modified_base 15: mod_base = OTHER; note = 2'O-methyl-adenosine
  modified_base 16: mod_base = OTHER; note = 2' Fluoro-cytidine
  modified_base 17: mod_base = um
  modified_base 18: mod_base = OTHER; note = 2' Fluoro-guanosine
  modified_base 19: mod_base = OTHER; note = 2'O-methyl-adenosine
  misc_feature 1^2: note = phosphorothioate linkage
  misc_feature 2^3: note = phosphorothioate linkage
  misc_feature 17^18: note = phosphorothioate linkage
  misc_feature 18^19: note = phosphorothioate linkage
gacacctccaaaatactga

SEQ ID NO: 65 - RNA, 19 nt, synthetic construct
  source 1..19: mol_type = other RNA
  misc_feature 1..19: note = Description: B4GALT1 siRNA antisense strands (modified); Antisense strand ID: modified_base; Underlying base sequence: 2
  modified_base 1: mod_base = OTHER; note = 2'O-methyl-adenosine
  modified_base 2: mod_base = OTHER; note = 2' Fluoro-guanosine
  modified_base 3: mod_base = OTHER; note = 2'O-methyl-adenosine
  modified_base 4: mod_base = OTHER; note = 2'Fluoro-adenosine
  modified_base 5: mod_base = um
  modified_base 6: mod_base = OTHER; note = 2' Fluoro-guanosine
  modified_base 7: mod_base = OTHER; note = 2'O-methyl-adenosine
  modified_base 8: mod_base = OTHER; note = 2' Fluoro-guanosine
  modified_base 9: mod_base = um
  modified_base 10: mod_base = OTHER; note = 2'Fluoro-adenosine
  modified_base 11: mod_base = gm
  modified_base 12: mod_base = OTHER; note = 2' Fluoro-guanosine
  modified_base 13: mod_base = OTHER; note = 2'O-methyl-adenosine
  modified_base 14: mod_base = OTHER; note = 2'Fluoro-adenosine
  modified_base 15: mod_base = OTHER; note = 2'O-methyl-adenosine
  modified_base 16: mod_base = OTHER; note = 2' Fluoro-guanosine
  modified_base 17: mod_base = cm
  modified_base 18: mod_base = OTHER; note = 2' Fluoro-cytidine
  modified_base 19: mod_base = OTHER; note = 2'O-methyl-adenosine
  misc_feature 1^2: note = phosphorothioate linkage
  misc_feature 2^3: note = phosphorothioate linkage
  misc_feature 17^18: note = phosphorothioate linkage
  misc_feature 18^19: note = phosphorothioate linkage
ataattattaggaaatcca

SEQ ID NO: 66 - RNA, 19 nt, synthetic construct
  source 1..19: mol_type = other RNA
  misc_feature 1..19: note = Description: B4GALT1 siRNA antisense strands (modified); Antisense strand ID: modified_base; Underlying base sequence: 2
  modified_base 1: mod_base = OTHER; note = 2'O-methyl-adenosine
  modified_base 2: mod_base = OTHER; note = 2'Fluoro-adenosine
  modified_base 3: mod_base = OTHER; note = 2'O-methyl-adenosine
  modified_base 4: mod_base = OTHER; note = 2'Fluoro-adenosine
  modified_base 5: mod_base = um
  modified_base 6: mod_base = OTHER; note = 2'Fluoro-adenosine
  modified_base 7: mod_base = cm
  modified_base 8: mod_base = OTHER; note = 2'Fluoro-adenosine
  modified_base 9: mod_base = um
  modified_base 10: mod_base = OTHER; note = 2'Fluoro-adenosine
  modified_base 11: mod_base = gm
  modified_base 12: mod_base = OTHER; note = 2' Fluoro-guanosine
  modified_base 13: mod_base = OTHER; note = 2'O-methyl-adenosine
  modified_base 14: mod_base = OTHER; note = 2'Fluoro-adenosine
  modified_base 15: mod_base = OTHER; note = 2'O-methyl-adenosine
  modified_base 16: mod_base = OTHER; note = 2' Fluoro-guanosine
  modified_base 17: mod_base = um
  modified_base 18: mod_base = OTHER; note = 2' Fluoro-cytidine
  modified_base 19: mod_base = OTHER; note = 2'O-methyl-adenosine
  misc_feature 1^2: note = phosphorothioate linkage
  misc_feature 2^3: note = phosphorothioate linkage
  misc_feature 17^18: note = phosphorothioate linkage
  misc_feature 18^19: note = phosphorothioate linkage
aaaatacataggaaattca

SEQ ID NO: 67 - RNA, 19 nt, synthetic construct
  source 1..19: mol_type = other RNA
  misc_feature 1..19: note = Description: B4GALT1 siRNA antisense strands (modified); Antisense strand ID: modified_base; Underlying base sequence: 2
  modified_base 1: mod_base = gm
  modified_base 2: mod_base = OTHER; note = 2' Fluoro-guanosine
  modified_base 3: mod_base = OTHER; note = 2'O-methyl-adenosine
  modified_base 4: mod_base = OTHER; note = 2' Fluoro-guanosine
  modified_base 5: mod_base = cm
  modified_base 6: mod_base = OTHER; note = 2' Fluoro-guanosine
  modified_base 7: mod_base = cm
  modified_base 8: mod_base = OTHER; note = 2' Fluoro-guanosine
  modified_base 9: mod_base = gm
  modified_base 10: mod_base = OTHER; note = 2' Fluoro-guanosine
  modified_base 11: mod_base = OTHER; note = 2'O-methyl-adenosine
  modified_base 12: mod_base = OTHER; note = 2' Fluoro-cytidine
  modified_base 13: mod_base = OTHER; note = 2'O-methyl-adenosine
  modified_base 14: mod_base = OTHER; note = 2' Fluoro-guanosine
  modified_base 15: mod_base = cm
  modified_base 16: mod_base = OTHER; note = 2' Fluoro-cytidine
  modified_base 17: mod_base = OTHER; note = 2'O-methyl-adenosine
  modified_base 18: mod_base = OTHER; note = 2' Fluoro-guanosine
  modified_base 19: mod_base = cm
  misc_feature 1^2: note = phosphorothioate linkage
  misc_feature 2^3: note = phosphorothioate linkage
  misc_feature 17^18: note = phosphorothioate linkage
  misc_feature 18^19: note = phosphorothioate linkage
gtatctctgtacatccagc

SEQ ID NO: 68 - RNA, 19 nt, synthetic construct
  source 1..19: mol_type = other RNA
  misc_feature 1..19: note = Description: B4GALT1 siRNA antisense strands (modified); Antisense strand ID: modified_base; Underlying base sequence: 2
  modified_base 1: mod_base = um
  modified_base 2: mod_base = OTHER; note = 2' Fluoro-guanosine
  modified_base 3: mod_base = cm
  modified_base 4: mod_base = OTHER; note = 2' Fluoro-guanosine
  modified_base 5: mod_base = um
  modified_base 6: mod_base = OTHER; note = 2' Fluoro-guanosine
  modified_base 7: mod_base = um
  modified_base 8: mod_base = OTHER; note = 2'Fluoro-adenosine
  modified_base 9: mod_base = OTHER; note = 2'O-methyl-adenosine
  modified_base 10: mod_base = OTHER; note = 2' Fluoro-guanosine
  modified_base 11: mod_base = gm
  modified_base 12: mod_base = OTHER; note = 2' Fluoro-cytidine
  modified_base 13: mod_base = OTHER; note = 2'O-methyl-adenosine
  modified_base 14: mod_base = OTHER; note = 2' Fluoro-cytidine
  modified_base 15: mod_base = um
  modified_base 16: mod_base = OTHER; note = 2' Fluoro-guanosine
  modified_base 17: mod_base = um
  modified_base 18: mod_base = OTHER; note = 2' Fluoro-guanosine
  modified_base 19: mod_base = gm
  misc_feature 1^2: note = phosphorothioate linkage
  misc_feature 2^3: note = phosphorothioate linkage
  misc_feature 17^18: note = phosphorothioate linkage
  misc_feature 18^19: note = phosphorothioate linkage
ttcttttaaggcactttgg

SEQ ID NO: 69 - RNA, 19 nt, synthetic construct
  source 1..19: mol_type = other RNA
  misc_feature 1..19: note = Description: B4GALT1 siRNA antisense strands (modified); Antisense strand ID: modified_base; Underlying base sequence: 2
  modified_base 1: mod_base = gm
  modified_base 2: mod_base = OTHER; note = 2' Fluoro-guanosine
  modified_base 3: mod_base = OTHER; note = 2'O-methyl-adenosine
  modified_base 4: mod_base = OTHER; note = 2'Fluoro-adenosine
  modified_base 5: mod_base = OTHER; note = 2'O-methyl-adenosine
  modified_base 6: mod_base = OTHER; note = 2' Fluoro-guanosine
  modified_base 7: mod_base = um
  modified_base 8: mod_base = OTHER; note = 2' Fluoro-cytidine
  modified_base 9: mod_base = OTHER; note = 2'O-methyl-adenosine
  modified_base 10: mod_base = OTHER; note = 2'Fluoro-adenosine
  modified_base 11: mod_base = gm
  modified_base 12: mod_base = OTHER; note = 2' Fluoro-guanosine
  modified_base 13: mod_base = um
  modified_base 14: mod_base = OTHER; note = 2' Fluoro-guanosine
  modified_base 15: mod_base = OTHER; note = 2'O-methyl-adenosine
  modified_base 16: mod_base = OTHER; note = 2' Fluoro-cytidine
  modified_base 17: mod_base = OTHER; note = 2'O-methyl-adenosine
  modified_base 18: mod_base = OTHER; note = 2' Fluoro-guanosine
  modified_base 19: mod_base = OTHER; note = 2'O-methyl-adenosine
  misc_feature 1^2: note = phosphorothioate linkage
  misc_feature 2^3: note = phosphorothioate linkage
  misc_feature 17^18: note = phosphorothioate linkage
  misc_feature 18^19: note = phosphorothioate linkage
ggaaattcaagtttacata

SEQ ID NO: 70 - RNA, 19 nt, synthetic construct
  source 1..19: mol_type = other RNA
  misc_feature 1..19: note = Description: B4GALT1 siRNA antisense strands (modified); Antisense strand ID: modified_base; Underlying base sequence: 2
  modified_base 1: mod_base = OTHER; note = 2'O-methyl-adenosine
  modified_base 2: mod_base = OTHER; note = 2' Fluoro-guanosine
  modified_base 3: mod_base = um
  modified_base 4: mod_base = OTHER; note = 2' Fluoro-guanosine
  modified_base 5: mod_base = cm
  modified_base 6: mod_base = OTHER; note = 2'Fluoro-adenosine
  modified_base 7: mod_base = OTHER; note = 2'O-methyl-adenosine
  modified_base 8: mod_base = OTHER; note = 2' Fluoro-cytidine
  modified_base 9: mod_base = gm
  modified_base 10: mod_base = OTHER; note = 2' Fluoro-guanosine
  modified_base 11: mod_base = OTHER; note = 2'O-methyl-adenosine
  modified_base 12: mod_base = OTHER; note = 2'Fluoro-adenosine
  modified_base 13: mod_base = OTHER; note = 2'O-methyl-adenosine
  modified_base 14: mod_base = OTHER; note = 2' Fluoro-guanosine
  modified_base 15: mod_base = gm
  modified_base 16: mod_base = OTHER; note = 2' Fluoro-guanosine
  modified_base 17: mod_base = gm
  modified_base 18: mod_base = OTHER; note = 2' Fluoro-cytidine
  modified_base 19: mod_base = cm
  misc_feature 1^2: note = phosphorothioate linkage
  misc_feature 2^3: note = phosphorothioate linkage
  misc_feature 17^18: note = phosphorothioate linkage
  misc_feature 18^19: note = phosphorothioate linkage
attgcaacggaaatgtgcc

SEQ ID NO: 71 - RNA, 19 nt, synthetic construct
  source 1..19: mol_type = other RNA
  misc_feature 1..19: note = Description: B4GALT1 siRNA antisense strands (modified); Antisense strand ID: modified_base; Underlying base sequence: 2
  modified_base 1: mod_base = OTHER; note = 2'O-methyl-adenosine
  modified_base 2: mod_base = OTHER; note = 2' Fluoro-guanosine
  modified_base 3: mod_base = gm
  modified_base 4: mod_base = OTHER; note = 2'Fluoro-adenosine
  modified_base 5: mod_base = OTHER; note = 2'O-methyl-adenosine
  modified_base 6: mod_base = OTHER; note = 2'Fluoro-adenosine
  modified_base 7: mod_base = um
  modified_base 8: mod_base = OTHER; note = 2' Fluoro-guanosine
  modified_base 9: mod_base = cm
  modified_base 10: mod_base = OTHER; note = 2'Fluoro-adenosine
  modified_base 11: mod_base = OTHER; note = 2'O-methyl-adenosine
  modified_base 12: mod_base = OTHER; note = 2' Fluoro-guanosine
  modified_base 13: mod_base = um
  modified_base 14: mod_base = OTHER; note = 2' Fluoro-guanosine
  modified_base 15: mod_base = um
  modified_base 16: mod_base = OTHER; note = 2'Fluoro-adenosine
  modified_base 17: mod_base = cm
  modified_base 18: mod_base = OTHER; note = 2'Fluoro-adenosine
  modified_base 19: mod_base = um
  misc_feature 1^2: note = phosphorothioate linkage
  misc_feature 2^3: note = phosphorothioate linkage
  misc_feature 17^18: note = phosphorothioate linkage
  misc_feature 18^19: note = phosphorothioate linkage
aggaaattcaagtttacat

SEQ ID NO: 72 - RNA, 19 nt, synthetic construct
  source 1..19: mol_type = other RNA
  misc_feature 1..19: note = Description: B4GALT1 siRNA antisense strands (modified); Antisense strand ID: modified_base; Underlying base sequence: 2
  modified_base 1: mod_base = um
  modified_base 2: mod_base = OTHER; note = 2'Fluoro-adenosine
  modified_base 3: mod_base = OTHER; note = 2'O-methyl-adenosine
  modified_base 4: mod_base = OTHER; note = 2' Fluoro-guanosine
  modified_base 5: mod_base = um
  modified_base 6: mod_base = OTHER; note = 2'Fluoro-adenosine
  modified_base 7: mod_base = um
  modified_base 8: mod_base = OTHER; note = 2' Fluoro-guanosine
  modified_base 9: mod_base = OTHER; note = 2'O-methyl-adenosine
  modified_base 10: mod_base = OTHER; note = 2' Fluoro-guanosine
  modified_base 11: mod_base = gm
  modified_base 12: mod_base = OTHER; note = 2'Fluoro-adenosine
  modified_base 13: mod_base = OTHER; note = 2'O-methyl-adenosine
  modified_base 14: mod_base = OTHER; note = 2'Fluoro-adenosine
  modified_base 15: mod_base = um
  modified_base 16: mod_base = OTHER; note = 2' Fluoro-cytidine
  modified_base 17: mod_base = cm
  modified_base 18: mod_base = OTHER; note = 2'Fluoro-adenosine
  modified_base 19: mod_base = um
  misc_feature 1^2: note = phosphorothioate linkage
  misc_feature 2^3: note = phosphorothioate linkage
  misc_feature 17^18: note = phosphorothioate linkage
  misc_feature 18^19: note = phosphorothioate linkage
taattattaggaaatccat

SEQ ID NO: 73 - RNA, 19 nt, synthetic construct
  source 1..19: mol_type = other RNA
  misc_feature 1..19: note = Description: B4GALT1 siRNA antisense strands (modified); Antisense strand ID: modified_base; Underlying base sequence: 2
  modified_base 1: mod_base = um
  modified_base 2: mod_base = OTHER; note = 2' Fluoro-guanosine
  modified_base 3: mod_base = um
  modified_base 4: mod_base = OTHER; note = 2'Fluoro-adenosine
  modified_base 5: mod_base = cm
  modified_base 6: mod_base = OTHER; note = 2' Fluoro-guanosine
  modified_base 7: mod_base = um
  modified_base 8: mod_base = OTHER; note = 2'Fluoro-adenosine
  modified_base 9: mod_base = gm
  modified_base 10: mod_base = OTHER; note = 2'Fluoro-adenosine
  modified_base 11: mod_base = gm
  modified_base 12: mod_base = OTHER; note = 2' Fluoro-cytidine
  modified_base 13: mod_base = OTHER; note = 2'O-methyl-adenosine
  modified_base 14: mod_base = OTHER; note = 2' Fluoro-guanosine
  modified_base 15: mod_base = OTHER; note = 2'O-methyl-adenosine
  modified_base 16: mod_base = OTHER; note = 2' Fluoro-guanosine
  modified_base 17: mod_base = OTHER; note = 2'O-methyl-adenosine
  modified_base 18: mod_base = OTHER; note = 2' Fluoro-cytidine
  modified_base 19: mod_base = OTHER; note = 2'O-methyl-adenosine
  misc_feature 1^2: note = phosphorothioate linkage
  misc_feature 2^3: note = phosphorothioate linkage
  misc_feature 17^18: note = phosphorothioate linkage
  misc_feature 18^19: note = phosphorothioate linkage
tttacttagagcagagaca

SEQ ID NO: 74 - RNA, 19 nt, synthetic construct
  source 1..19: mol_type = other RNA
  misc_feature 1..19: note = Description: B4GALT1 siRNA antisense strands (modified); Antisense strand ID: modified_base; Underlying base sequence: 2
  modified_base 1: mod_base = um
  modified_base 2: mod_base = OTHER; note = 2' Fluoro-guanosine
  modified_base 3: mod_base = um
  modified_base 4: mod_base = OTHER; note = 2' Fluoro-cytidine
  modified_base 5: mod_base = um
  modified_base 6: mod_base = OTHER; note = 2' Fluoro-guanosine
  modified_base 7: mod_base = um
  modified_base 8: mod_base = OTHER; note = 2' Fluoro-guanosine
  modified_base 9: mod_base = OTHER; note = 2'O-methyl-adenosine
  modified_base 10: mod_base = OTHER; note = 2'Fluoro-adenosine
  modified_base 11: mod_base = gm
  modified_base 12: mod_base = OTHER; note = 2' Fluoro-guanosine
  modified_base 13: mod_base = cm
  modified_base 14: mod_base = OTHER; note = 2'Fluoro-adenosine
  modified_base 15: mod_base = cm
  modified_base 16: mod_base = OTHER; note = 2' Fluoro-guanosine
  modified_base 17: mod_base = um
  modified_base 18: mod_base = OTHER; note = 2' Fluoro-guanosine
  modified_base 19: mod_base = gm
  misc_feature 1^2: note = phosphorothioate linkage
  misc_feature 2^3: note = phosphorothioate linkage
  misc_feature 17^18: note = phosphorothioate linkage
  misc_feature 18^19: note = phosphorothioate linkage
tttcttttaaggcactttg

SEQ ID NO: 75 - RNA, 19 nt, synthetic construct
  source 1..19: mol_type = other RNA
  misc_feature 1..19: note = Description: B4GALT1 siRNA antisense strands (modified); Antisense strand ID: modified_base; Underlying base sequence: 2
  modified_base 1: mod_base = um
  modified_base 2: mod_base = OTHER; note = 2'Fluoro-adenosine
  modified_base 3: mod_base = OTHER; note = 2'O-methyl-adenosine
  modified_base 4: mod_base = OTHER; note = 2' Fluoro-guanosine
  modified_base 5: mod_base = um
  modified_base 6: mod_base = OTHER; note = 2'Fluoro-adenosine
  modified_base 7: mod_base = OTHER; note = 2'O-methyl-adenosine
  modified_base 8: mod_base = OTHER; note = 2'Fluoro-adenosine
  modified_base 9: mod_base = OTHER; note = 2'O-methyl-adenosine
  modified_base 10: mod_base = OTHER; note = 2' Fluoro-guanosine
  modified_base 11: mod_base = gm
  modified_base 12: mod_base = OTHER; note = 2' Fluoro-cytidine
  modified_base 13: mod_base = OTHER; note = 2'O-methyl-adenosine
  modified_base 14: mod_base = OTHER; note = 2' Fluoro-cytidine
  modified_base 15: mod_base = OTHER; note = 2'O-methyl-adenosine
  modified_base 16: mod_base = OTHER; note = 2' Fluoro-guanosine
  modified_base 17: mod_base = um
  modified_base 18: mod_base = OTHER; note = 2' Fluoro-cytidine
  modified_base 19: mod_base = OTHER; note = 2'O-methyl-adenosine
  misc_feature 1^2: note = phosphorothioate linkage
  misc_feature 2^3: note = phosphorothioate linkage
  misc_feature 17^18: note = phosphorothioate linkage
  misc_feature 18^19: note = phosphorothioate linkage
taattaaaaggcacattca

SEQ ID NO: 76 - RNA, 19 nt, synthetic construct
  source 1..19: mol_type = other RNA
  misc_feature 1..19: note = Description: B4GALT1 siRNA antisense strands (modified); Antisense strand ID: modified_base; Underlying base sequence: 2
  modified_base 1: mod_base = OTHER; note = 2'O-methyl-adenosine
  modified_base 2: mod_base = OTHER; note = 2' Fluoro-guanosine
  modified_base 3: mod_base = OTHER; note = 2'O-methyl-adenosine
  modified_base 4: mod_base = OTHER; note = 2' Fluoro-cytidine
  modified_base 5: mod_base = OTHER; note = 2'O-methyl-adenosine
  modified_base 6: mod_base = OTHER; note = 2' Fluoro-guanosine
  modified_base 7: mod_base = OTHER; note = 2'O-methyl-adenosine
  modified_base 8: mod_base = OTHER; note = 2' Fluoro-guanosine
  modified_base 9: mod_base = gm
  modified_base 10: mod_base = OTHER; note = 2'Fluoro-adenosine
  modified_base 11: mod_base = OTHER; note = 2'O-methyl-adenosine
  modified_base 12: mod_base = OTHER; note = 2'Fluoro-adenosine
  modified_base 13: mod_base = um
  modified_base 14: mod_base = OTHER; note = 2' Fluoro-guanosine
  modified_base 15: mod_base = cm
  modified_base 16: mod_base = OTHER; note = 2'Fluoro-adenosine
  modified_base 17: mod_base = OTHER; note = 2'O-methyl-adenosine
  modified_base 18: mod_base = OTHER; note = 2' Fluoro-guanosine
  modified_base 19: mod_base = um
  misc_feature 1^2: note = phosphorothioate linkage
  misc_feature 2^3: note = phosphorothioate linkage
  misc_feature 17^18: note = phosphorothioate linkage
  misc_feature 18^19: note = phosphorothioate linkage
atacataggaaattcaagt

SEQ ID NO: 77 - RNA, 19 nt, synthetic construct
  source 1..19: mol_type = other RNA
  misc_feature 1..19: note = Description: B4GALT1 siRNA antisense strands (modified); Antisense strand ID: modified_base; Underlying base sequence: 2
  modified_base 1: mod_base = gm
  modified_base 2: mod_base = OTHER; note = 2' Fluoro-guanosine
  modified_base 3: mod_base = cm
  modified_base 4: mod_base = OTHER; note = 2'Fluoro-adenosine
  modified_base 5: mod_base = cm
  modified_base 6: mod_base = OTHER; note = 2' Fluoro-guanosine
  modified_base 7: mod_base = um
  modified_base 8: mod_base = OTHER; note = 2' Fluoro-guanosine
  modified_base 9: mod_base = gm
  modified_base 10: mod_base = OTHER; note = 2' Fluoro-guanosine
  modified_base 11: mod_base = OTHER; note = 2'O-methyl-adenosine
  modified_base 12: mod_base = OTHER; note = 2'Fluoro-adenosine
  modified_base 13: mod_base = OTHER; note = 2'O-methyl-adenosine
  modified_base 14: mod_base = OTHER; note = 2'Fluoro-adenosine
  modified_base 15: mod_base = gm
  modified_base 16: mod_base = OTHER; note = 2' Fluoro-guanosine
  modified_base 17: mod_base = cm
  modified_base 18: mod_base = OTHER; note = 2'Fluoro-adenosine
  modified_base 19: mod_base = gm
  misc_feature 1^2: note = phosphorothioate linkage
  misc_feature 2^3: note = phosphorothioate linkage
  misc_feature 17^18: note = phosphorothioate linkage
  misc_feature 18^19: note = phosphorothioate linkage
ggcactttggaaaagtcag

SEQ ID NO: 78 - RNA, 19 nt, synthetic construct
  source 1..19: mol_type = other RNA
  misc_feature 1..19: note = Description: B4GALT1 siRNA antisense strands (modified); Antisense strand ID: modified_base; Underlying base sequence: 2
  modified_base 1: mod_base = OTHER; note = 2'O-methyl-adenosine
  modified_base 2: mod_base = OTHER; note = 2' Fluoro-guanosine
  modified_base 3: mod_base = um
  modified_base 4: mod_base = OTHER; note = 2'Fluoro-adenosine
  modified_base 5: mod_base = um
  modified_base 6: mod_base = OTHER; note = 2' Fluoro-guanosine
  modified_base 7: mod_base = OTHER; note = 2'O-methyl-adenosine
  modified_base 8: mod_base = OTHER; note = 2' Fluoro-guanosine
  modified_base 9: mod_base = gm
  modified_base 10: mod_base = OTHER; note = 2'Fluoro-adenosine
  modified_base 11: mod_base = OTHER; note = 2'O-methyl-adenosine
  modified_base 12: mod_base = OTHER; note = 2'Fluoro-adenosine
  modified_base 13: mod_base = um
  modified_base 14: mod_base = OTHER; note = 2' Fluoro-cytidine
  modified_base 15: mod_base = cm
  modified_base 16: mod_base = OTHER; note = 2'Fluoro-adenosine
  modified_base 17: mod_base = um
  modified_base 18: mod_base = OTHER; note = 2' Fluoro-guanosine
  modified_base 19: mod_base = gm
  misc_feature 1^2: note = phosphorothioate linkage
  misc_feature 2^3: note = phosphorothioate linkage
  misc_feature 17^18: note = phosphorothioate linkage
  misc_feature 18^19: note = phosphorothioate linkage
attattaggaaatccattg

SEQ ID NO: 79 - RNA, 19 nt, synthetic construct
  source 1..19: mol_type = other RNA
  misc_feature 1..19: note = Description: B4GALT1 siRNA antisense strands (modified); Antisense strand ID: modified_base; Underlying base sequence: 2
  modified_base 1: mod_base = OTHER; note = 2'O-methyl-adenosine
  modified_base 2: mod_base = OTHER; note = 2' Fluoro-cytidine
  modified_base 3: mod_base = OTHER; note = 2'O-methyl-adenosine
  modified_base 4: mod_base = OTHER; note = 2' Fluoro-cytidine
  modified_base 5: mod_base = cm
  modified_base 6: mod_base = OTHER; note = 2' Fluoro-guanosine
  modified_base 7: mod_base = cm
  modified_base 8: mod_base = OTHER; note = 2' Fluoro-cytidine
  modified_base 9: mod_base = OTHER; note = 2'O-methyl-adenosine
  modified_base 10: mod_base = OTHER; note = 2'Fluoro-adenosine
  modified_base 11: mod_base = OTHER; note = 2'O-methyl-adenosine
  modified_base 12: mod_base = OTHER; note = 2'Fluoro-adenosine
  modified_base 13: mod_base = um
  modified_base 14: mod_base = OTHER; note = 2'Fluoro-adenosine
  modified_base 15: mod_base = cm
  modified_base 16: mod_base = OTHER; note = 2' Fluoro-guanosine
  modified_base 17: mod_base = gm
  modified_base 18: mod_base = OTHER; note = 2'Fluoro-adenosine
  modified_base 19: mod_base = OTHER; note = 2'O-methyl-adenosine
  misc_feature 1^2: note = phosphorothioate linkage
  misc_feature 2^3: note = phosphorothioate linkage
  misc_feature 17^18: note = phosphorothioate linkage
  misc_feature 18^19: note = phosphorothioate linkage
acacctccaaaatactgaa

SEQ ID NO: 80 - RNA, 19 nt, synthetic construct
  source 1..19: mol_type = other RNA
  misc_feature 1..19: note = Description: B4GALT1 siRNA antisense strands (modified); Antisense strand ID: modified_base; Underlying base sequence: 2
  modified_base 1: mod_base = gm
  modified_base 2: mod_base = OTHER; note = 2' Fluoro-cytidine
  modified_base 3: mod_base = OTHER; note = 2'O-methyl-adenosine
  modified_base 4: mod_base = OTHER; note = 2' Fluoro-cytidine
  modified_base 5: mod_base = um
  modified_base 6: mod_base = OTHER; note = 2' Fluoro-guanosine
  modified_base 7: mod_base = um
  modified_base 8: mod_base = OTHER; note = 2' Fluoro-guanosine
  modified_base 9: mod_base = gm
  modified_base 10: mod_base = OTHER; note = 2'Fluoro-adenosine
  modified_base 11: mod_base = OTHER; note = 2'O-methyl-adenosine
  modified_base 12: mod_base = OTHER; note = 2'Fluoro-adenosine
  modified_base 13: mod_base = OTHER; note = 2'O-methyl-adenosine
  modified_base 14: mod_base = OTHER; note = 2' Fluoro-guanosine
  modified_base 15: mod_base = um
  modified_base 16: mod_base = OTHER; note = 2' Fluoro-cytidine
  modified_base 17: mod_base = OTHER; note = 2'O-methyl-adenosine
  modified_base 18: mod_base = OTHER; note = 2' Fluoro-guanosine
  modified_base 19: mod_base = gm
  misc_feature 1^2: note = phosphorothioate linkage
  misc_feature 2^3: note = phosphorothioate linkage
  misc_feature 17^18: note = phosphorothioate linkage
  misc_feature 18^19: note = phosphorothioate linkage
gcactttggaaaagtcagg

SEQ ID NO: 81 - RNA, 19 nt, synthetic construct
  source 1..19: mol_type = other RNA
  misc_feature 1..19: note = Description: B4GALT1 siRNA antisense strands (modified); Antisense strand ID: modified_base; Underlying base sequence: 2
  modified_base 1: mod_base = OTHER; note = 2'O-methyl-adenosine
  modified_base 2: mod_base = OTHER; note = 2'Fluoro-adenosine
  modified_base 3: mod_base = um
  modified_base 4: mod_base = OTHER; note = 2'Fluoro-adenosine
  modified_base 5: mod_base = OTHER; note = 2'O-methyl-adenosine
  modified_base 6: mod_base = OTHER; note = 2' Fluoro-guanosine
  modified_base 7: mod_base = um
  modified_base 8: mod_base = OTHER; note = 2'Fluoro-adenosine
  modified_base 9: mod_base = um
  modified_base 10: mod_base = OTHER; note = 2' Fluoro-guanosine
  modified_base 11: mod_base = OTHER; note = 2'O-methyl-adenosine
  modified_base 12: mod_base = OTHER; note = 2' Fluoro-guanosine
  modified_base 13: mod_base = gm
  modified_base 14: mod_base = OTHER; note = 2'Fluoro-adenosine
  modified_base 15: mod_base = OTHER; note = 2'O-methyl-adenosine
  modified_base 16: mod_base = OTHER; note = 2'Fluoro-adenosine
  modified_base 17: mod_base = um
  modified_base 18: mod_base = OTHER; note = 2' Fluoro-cytidine
  modified_base 19: mod_base = cm
  misc_feature 1^2: note = phosphorothioate linkage
  misc_feature 2^3: note = phosphorothioate linkage
  misc_feature 17^18: note = phosphorothioate linkage
  misc_feature 18^19: note = phosphorothioate linkage
aataattattaggaaatcc

SEQ ID NO: 82 - RNA, 19 nt, synthetic construct
  source 1..19: mol_type = other RNA
  misc_feature 1..19: note = Description: B4GALT1 siRNA sense strands (modified); Sense strand ID: ETXS1237; Underlying Base Sequence: SEQ ID NO: 42
  modified_base 1: mod_base = OTHER; note = 2' Fluoro-cytidine
  modified_base 2: mod_base = um
  modified_base 3: mod_base = OTHER; note = 2' Fluoro-guanosine
  modified_base 4: mod_base = gm
  modified_base 5: mod_base = OTHER; note = 2'Fluoro-adenosine
  modified_base 6: mod_base = OTHER; note = 2'O-methyl-adenosine
  modified_base 7: mod_base = OTHER; note = 2' Fluoro-guanosine
  modified_base 8: mod_base = um
  modified_base 9: mod_base = OTHER; note = 2' Fluoro-guanosine
  modified_base 10: mod_base = cm
  modified_base 11: mod_base = OTHER; note = 2' Fluoro-cytidine
  modified_base 12: mod_base = um
  modified_base 13: mod_base = OTHER; note = 2'Fluoro-adenosine
  modified_base 14: mod_base = um
  modified_base 15: mod_base = OTHER; note = 2' Fluoro-guanosine
  modified_base 16: mod_base = um
  modified_base 17: mod_base = OTHER; note = 2'Fluoro-adenosine
  modified_base 18: mod_base = um
  modified_base 19: mod_base = OTHER; note = 2' Fluoro-guanosine
  misc_feature 1^2: note = phosphorothioate linkage
  misc_feature 2^3: note = phosphorothioate linkage
cttgaatttcctatgtatt

SEQ ID NO: 83 - RNA, 19 nt, synthetic construct
  source 1..19: mol_type = other RNA
  misc_feature 1..19: note = Description: B4GALT1 siRNA sense strands (modified); Sense strand ID: ETXS1239; Underlying Base Sequence: SEQ ID NO: 43
  modified_base 1: mod_base = OTHER; note = 2'Fluoro-adenosine
  modified_base 2: mod_base = OTHER; note = 2'O-methyl-adenosine
  modified_base 3: mod_base = OTHER; note = 2' Fluoro-guanosine
  modified_base 4: mod_base = gm
  modified_base 5: mod_base = OTHER; note = 2' Fluoro-guanosine
  modified_base 6: mod_base = OTHER; note = 2'O-methyl-adenosine
  modified_base 7: mod_base = OTHER; note = 2' Fluoro-guanosine
  modified_base 8: mod_base = um
  modified_base 9: mod_base = OTHER; note = 2' Fluoro-guanosine
  modified_base 10: mod_base = cm
  modified_base 11: mod_base = OTHER; note = 2' Fluoro-cytidine
  modified_base 12: mod_base = um
  modified_base 13: mod_base = OTHER; note = 2'Fluoro-adenosine
  modified_base 14: mod_base = OTHER; note = 2'O-methyl-adenosine
  modified_base 15: mod_base = OTHER; note = 2' Fluoro-guanosine
  modified_base 16: mod_base = OTHER; note = 2'O-methyl-adenosine
  modified_base 17: mod_base = OTHER; note = 2'Fluoro-adenosine
  modified_base 18: mod_base = um
  modified_base 19: mod_base = OTHER; note = 2' Fluoro-guanosine
  misc_feature 1^2: note = phosphorothioate linkage
  misc_feature 2^3: note = phosphorothioate linkage
aatggatttcctaataatt

SEQ ID NO: 84 - RNA, 19 nt, synthetic construct
  source 1..19: mol_type = other RNA
  misc_feature 1..19: note = Description: B4GALT1 siRNA sense strands (modified); Sense strand ID: ETXS1241; Underlying Base Sequence: SEQ ID NO: 44
  modified_base 1: mod_base = OTHER; note = 2' Fluoro-guanosine
  modified_base 2: mod_base = cm
  modified_base 3: mod_base = OTHER; note = 2'Fluoro-adenosine
  modified_base 4: mod_base = gm
  modified_base 5: mod_base = OTHER; note = 2' Fluoro-guanosine
  modified_base 6: mod_base = OTHER; note = 2'O-methyl-adenosine
  modified_base 7: mod_base = OTHER; note = 2' Fluoro-guanosine
  modified_base 8: mod_base = um
  modified_base 9: mod_base = OTHER; note = 2' Fluoro-guanosine
  modified_base 10: mod_base = um
  modified_base 11: mod_base = OTHER; note = 2' Fluoro-guanosine
  modified_base 12: mod_base = gm
  modified_base 13: mod_base = OTHER; note = 2'Fluoro-adenosine
  modified_base 14: mod_base = gm
  modified_base 15: mod_base = OTHER; note = 2' Fluoro-guanosine
  modified_base 16: mod_base = um
  modified_base 17: mod_base = OTHER; note = 2' Fluoro-guanosine
  modified_base 18: mod_base = um
  modified_base 19: mod_base = OTHER; note = 2' Fluoro-cytidine
  misc_feature 1^2: note = phosphorothioate linkage
  misc_feature 2^3: note = phosphorothioate linkage
tcagtattttggaggtgtc

SEQ ID NO: 85 - RNA, 19 nt, synthetic construct
  source 1..19: mol_type = other RNA
  misc_feature 1..19: note = Description: B4GALT1 siRNA sense strands (modified); Sense strand ID: ETXS1243; Underlying Base Sequence: SEQ ID NO: 45
  modified_base 1: mod_base = OTHER; note = 2' Fluoro-guanosine
  modified_base 2: mod_base = gm
  modified_base 3: mod_base = OTHER; note = 2' Fluoro-guanosine
  modified_base 4: mod_base = OTHER; note = 2'O-methyl-adenosine
  modified_base 5: mod_base = OTHER; note = 2' Fluoro-guanosine
  modified_base 6: mod_base = um
  modified_base 7: mod_base = OTHER; note = 2' Fluoro-guanosine
  modified_base 8: mod_base = cm
  modified_base 9: mod_base = OTHER; note = 2' Fluoro-cytidine
  modified_base 10: mod_base = um
  modified_base 11: mod_base = OTHER; note = 2'Fluoro-adenosine
  modified_base 12: mod_base = OTHER; note = 2'O-methyl-adenosine
  modified_base 13: mod_base = OTHER; note = 2' Fluoro-guanosine
  modified_base 14: mod_base = OTHER; note = 2'O-methyl-adenosine
  modified_base 15: mod_base = OTHER; note = 2'Fluoro-adenosine
  modified_base 16: mod_base = um
  modified_base 17: mod_base = OTHER; note = 2' Fluoro-guanosine
  modified_base 18: mod_base = OTHER; note = 2'O-methyl-adenosine
  modified_base 19: mod_base = OTHER; note = 2' Fluoro-guanosine
  misc_feature 1^2: note = phosphorothioate linkage
  misc_feature 2^3: note = phosphorothioate linkage
tggatttcctaataattat

SEQ ID NO: 86 - RNA, 19 nt, synthetic construct
  source 1..19: mol_type = other RNA
  misc_feature 1..19: note = Description: B4GALT1 siRNA sense strands (modified); Sense strand ID: ETXS1245; Underlying Base Sequence: SEQ ID NO: 46
  modified_base 1: mod_base = OTHER; note = 2' Fluoro-guanosine
  modified_base 2: mod_base = gm
  modified_base 3: mod_base = OTHER; note = 2'Fluoro-adenosine
  modified_base 4: mod_base = OTHER; note = 2'O-methyl-adenosine
  modified_base 5: mod_base = OTHER; note = 2' Fluoro-guanosine
  modified_base 6: mod_base = um
  modified_base 7: mod_base = OTHER; note = 2' Fluoro-guanosine
  modified_base 8: mod_base = cm
  modified_base 9: mod_base = OTHER; note = 2' Fluoro-cytidine
  modified_base 10: mod_base = um
  modified_base 11: mod_base = OTHER; note = 2'Fluoro-adenosine
  modified_base 12: mod_base = um
  modified_base 13: mod_base = OTHER; note = 2' Fluoro-guanosine
  modified_base 14: mod_base = um
  modified_base 15: mod_base = OTHER; note = 2'Fluoro-adenosine
  modified_base 16: mod_base = um
  modified_base 17: mod_base = OTHER; note = 2' Fluoro-guanosine
  modified_base 18: mod_base = um
  modified_base 19: mod_base = OTHER; note = 2' Fluoro-guanosine
  misc_feature 1^2: note = phosphorothioate linkage
  misc_feature 2^3: note = phosphorothioate linkage
tgaatttcctatgtatttt

SEQ ID NO: 87 - RNA, 19 nt, synthetic construct
  source 1..19: mol_type = other RNA
  misc_feature 1..19: note = Description: B4GALT1 siRNA sense strands (modified); Sense strand ID: ETXS1247; Underlying Base Sequence: SEQ ID NO: 47
  modified_base 1: mod_base = OTHER; note = 2' Fluoro-guanosine
  modified_base 2: mod_base = cm
  modified_base 3: mod_base = OTHER; note = 2' Fluoro-guanosine
  modified_base 4: mod_base = gm
  modified_base 5: mod_base = OTHER; note = 2' Fluoro-guanosine
  modified_base 6: mod_base = OTHER; note = 2'O-methyl-adenosine
  modified_base 7: mod_base = OTHER; note = 2' Fluoro-guanosine
  modified_base 8: mod_base = gm
  modified_base 9: mod_base = OTHER; note = 2' Fluoro-guanosine
  modified_base 10: mod_base = OTHER; note = 2'O-methyl-adenosine
  modified_base 11: mod_base = OTHER; note = 2' Fluoro-cytidine
  modified_base 12: mod_base = OTHER; note = 2'O-methyl-adenosine
  modified_base 13: mod_base = OTHER; note = 2' Fluoro-guanosine
  modified_base 14: mod_base = OTHER; note = 2'O-methyl-adenosine
  modified_base 15: mod_base = OTHER; note = 2' Fluoro-guanosine
  modified_base 16: mod_base = OTHER; note = 2'O-methyl-adenosine
  modified_base 17: mod_base = OTHER; note = 2' Fluoro-guanosine
  modified_base 18: mod_base = OTHER; note = 2'O-methyl-adenosine
  modified_base 19: mod_base = OTHER; note = 2' Fluoro-cytidine
  misc_feature 1^2: note = phosphorothioate linkage
  misc_feature 2^3: note = phosphorothioate linkage
gctggatgtacagagatac

SEQ ID NO: 88 - RNA, 19 nt, synthetic construct
  source 1..19: mol_type = other RNA
  misc_feature 1..19: note = Description: B4GALT1 siRNA sense strands (modified); Sense strand ID: ETXS1249; Underlying Base Sequence: SEQ ID NO: 48
  modified_base 1: mod_base = OTHER; note = 2' Fluoro-cytidine
  modified_base 2: mod_base = cm
  modified_base 3: mod_base = OTHER; note = 2'Fluoro-adenosine
  modified_base 4: mod_base = OTHER; note = 2'O-methyl-adenosine
  modified_base 5: mod_base = OTHER; note = 2'Fluoro-adenosine
  modified_base 6: mod_base = gm
  modified_base 7: mod_base = OTHER; note = 2' Fluoro-guanosine
  modified_base 8: mod_base = gm
  modified_base 9: mod_base = OTHER; note = 2' Fluoro-cytidine
  modified_base 10: mod_base = cm
  modified_base 11: mod_base = OTHER; note = 2' Fluoro-guanosine
  modified_base 12: mod_base = um
  modified_base 13: mod_base = OTHER; note = 2'Fluoro-adenosine
  modified_base 14: mod_base = OTHER; note = 2'O-methyl-adenosine
  modified_base 15: mod_base = OTHER; note = 2'Fluoro-adenosine
  modified_base 16: mod_base = OTHER; note = 2'O-methyl-adenosine
  modified_base 17: mod_base = OTHER; note = 2' Fluoro-guanosine
  modified_base 18: mod_base = OTHER; note = 2'O-methyl-adenosine
  modified_base 19: mod_base = OTHER; note = 2'Fluoro-adenosine
  misc_feature 1^2: note = phosphorothioate linkage
  misc_feature 2^3: note = phosphorothioate linkage
ccaaagtgccttaaaagaa

SEQ ID NO: 89 - RNA, 19 nt, synthetic construct
  source 1..19: mol_type = other RNA
  misc_feature 1..19: note = Description: B4GALT1 siRNA sense strands (modified); Sense strand ID: ETXS1251; Underlying Base Sequence: SEQ ID NO: 49
  modified_base 1: mod_base = OTHER; note = 2' Fluoro-guanosine
  modified_base 2: mod_base = OTHER; note = 2'O-methyl-adenosine
  modified_base 3: mod_base = OTHER; note = 2' Fluoro-guanosine
  modified_base 4: mod_base = gm
  modified_base 5: mod_base = OTHER; note = 2' Fluoro-guanosine
  modified_base 6: mod_base = OTHER; note = 2'O-methyl-adenosine
  modified_base 7: mod_base = OTHER; note = 2'Fluoro-adenosine
  modified_base 8: mod_base = OTHER; note = 2'O-methyl-adenosine
  modified_base 9: mod_base = OTHER; note = 2' Fluoro-cytidine
  modified_base 10: mod_base = um
  modified_base 11: mod_base = OTHER; note = 2' Fluoro-guanosine
  modified_base 12: mod_base = gm
  modified_base 13: mod_base = OTHER; note = 2'Fluoro-adenosine
  modified_base 14: mod_base = OTHER; note = 2'O-methyl-adenosine
  modified_base 15: mod_base = OTHER; note = 2' Fluoro-guanosine
  modified_base 16: mod_base = um
  modified_base 17: mod_base = OTHER; note = 2' Fluoro-guanosine
  modified_base 18: mod_base = cm
  modified_base 19: mod_base = OTHER; note = 2' Fluoro-cytidine
  misc_feature 1^2: note = phosphorothioate linkage
  misc_feature 2^3: note = phosphorothioate linkage
tatgtaaacttgaatttcc

SEQ ID NO: 90 - RNA, 19 nt, synthetic construct
  source 1..19: mol_type = other RNA
  misc_feature 1..19: note = Description: B4GALT1 siRNA sense strands (modified); Sense strand ID: ETXS1253; Underlying Base Sequence: SEQ ID NO: 50
  modified_base 1: mod_base = OTHER; note = 2' Fluoro-guanosine
  modified_base 2: mod_base = gm
  modified_base 3: mod_base = OTHER; note = 2' Fluoro-cytidine
  modified_base 4: mod_base = OTHER; note = 2'O-methyl-adenosine
  modified_base 5: mod_base = OTHER; note = 2' Fluoro-cytidine
  modified_base 6: mod_base = OTHER; note = 2'O-methyl-adenosine
  modified_base 7: mod_base = OTHER; note = 2' Fluoro-guanosine
  modified_base 8: mod_base = um
  modified_base 9: mod_base = OTHER; note = 2' Fluoro-guanosine
  modified_base 10: mod_base = cm
  modified_base 11: mod_base = OTHER; note = 2' Fluoro-cytidine
  modified_base 12: mod_base = gm
  modified_base 13: mod_base = OTHER; note = 2' Fluoro-guanosine
  modified_base 14: mod_base = um
  modified_base 15: mod_base = OTHER; note = 2' Fluoro-guanosine
  modified_base 16: mod_base = cm
  modified_base 17: mod_base = OTHER; note = 2'Fluoro-adenosine
  modified_base 18: mod_base = OTHER; note = 2'O-methyl-adenosine
  modified_base 19: mod_base = OTHER; note = 2' Fluoro-guanosine
  misc_feature 1^2: note = phosphorothioate linkage
  misc_feature 2^3: note = phosphorothioate linkage
ggcacatttccgttgcaat

SEQ ID NO: 91 - RNA, 19 nt, synthetic construct
  source 1..19: mol_type = other RNA
  misc_feature 1..19: note = Description: B4GALT1 siRNA sense strands (modified); Sense strand ID: ETXS1255; Underlying Base Sequence: SEQ ID NO: 51
  modified_base 1: mod_base = OTHER; note = 2'Fluoro-adenosine
  modified_base 2: mod_base = um
  modified_base 3: mod_base = OTHER; note = 2' Fluoro-guanosine
  modified_base 4: mod_base = um
  modified_base 5: mod_base = OTHER; note = 2'Fluoro-adenosine
  modified_base 6: mod_base = OTHER; note = 2'O-methyl-adenosine
  modified_base 7: mod_base = OTHER; note = 2'Fluoro-adenosine
  modified_base 8: mod_base = cm
  modified_base 9: mod_base = OTHER; note = 2' Fluoro-guanosine
  modified_base 10: mod_base = um
  modified_base 11: mod_base = OTHER; note = 2' Fluoro-guanosine
  modified_base 12: mod_base = OTHER; note = 2'O-methyl-adenosine
  modified_base 13: mod_base = OTHER; note = 2'Fluoro-adenosine
  modified_base 14: mod_base = um
  modified_base 15: mod_base = OTHER; note = 2' Fluoro-guanosine
  modified_base 16: mod_base = um
  modified_base 17: mod_base = OTHER; note = 2' Fluoro-cytidine
  modified_base 18: mod_base = cm
  modified_base 19: mod_base = OTHER; note = 2' Fluoro-guanosine
  misc_feature 1^2: note = phosphorothioate linkage
  misc_feature 2^3: note = phosphorothioate linkage
atgtaaacttgaatttcct

SEQ ID NO: 92 - RNA, 19 nt, synthetic construct
  source 1..19: mol_type = other RNA
  misc_feature 1..19: note = Description: B4GALT1 siRNA sense strands (modified); Sense strand ID: ETXS1257; Underlying Base Sequence: SEQ ID NO: 52
  modified_base 1: mod_base = OTHER; note = 2'Fluoro-adenosine
  modified_base 2: mod_base = um
  modified_base 3: mod_base = OTHER; note = 2' Fluoro-guanosine
  modified_base 4: mod_base = gm
  modified_base 5: mod_base = OTHER; note = 2'Fluoro-adenosine
  modified_base 6: mod_base = um
  modified_base 7: mod_base = OTHER; note = 2' Fluoro-guanosine
  modified_base 8: mod_base = um
  modified_base 9: mod_base = OTHER; note = 2' Fluoro-cytidine
  modified_base 10: mod_base = cm
  modified_base 11: mod_base = OTHER; note = 2' Fluoro-guanosine
  modified_base 12: mod_base = OTHER; note = 2'O-methyl-adenosine
  modified_base 13: mod_base = OTHER; note = 2'Fluoro-adenosine
  modified_base 14: mod_base = um
  modified_base 15: mod_base = OTHER; note = 2'Fluoro-adenosine
  modified_base 16: mod_base = OTHER; note = 2'O-methyl-adenosine
  modified_base 17: mod_base = OTHER; note = 2' Fluoro-guanosine
  modified_base 18: mod_base = um
  modified_base 19: mod_base = OTHER; note = 2'Fluoro-adenosine
  misc_feature 1^2: note = phosphorothioate linkage
  misc_feature 2^3: note = phosphorothioate linkage
atggatttcctaataatta

SEQ ID NO: 93 - RNA, 19 nt, synthetic construct
  source 1..19: mol_type = other RNA
  misc_feature 1..19: note = Description: B4GALT1 siRNA sense strands (modified); Sense strand ID: ETXS1259; Underlying Base Sequence: SEQ ID NO: 53
  modified_base 1: mod_base = OTHER; note = 2' Fluoro-guanosine
  modified_base 2: mod_base = gm
  modified_base 3: mod_base = OTHER; note = 2' Fluoro-guanosine
  modified_base 4: mod_base = cm
  modified_base 5: mod_base = OTHER; note = 2' Fluoro-guanosine
  modified_base 6: mod_base = cm
  modified_base 7: mod_base = OTHER; note = 2' Fluoro-guanosine
  modified_base 8: mod_base = gm
  modified_base 9: mod_base = OTHER; note = 2' Fluoro-cytidine
  modified_base 10: mod_base = um
  modified_base 11: mod_base = OTHER; note = 2' Fluoro-cytidine
  modified_base 12: mod_base = um
  modified_base 13: mod_base = OTHER; note = 2'Fluoro-adenosine
  modified_base 14: mod_base = OTHER; note = 2'O-methyl-adenosine
  modified_base 15: mod_base = OTHER; note = 2' Fluoro-guanosine
  modified_base 16: mod_base = um
  modified_base 17: mod_base = OTHER; note = 2'Fluoro-adenosine
  modified_base 18: mod_base = OTHER; note = 2'O-methyl-adenosine
  modified_base 19: mod_base = OTHER; note = 2'Fluoro-adenosine
  misc_feature 1^2: note = phosphorothioate linkage
  misc_feature 2^3: note = phosphorothioate linkage
tgtctctgctctaagtaaa

SEQ ID NO: 94 - RNA, 19 nt, synthetic construct
  source 1..19: mol_type = other RNA
  misc_feature 1..19: note = Description: B4GALT1 siRNA sense strands (modified); Sense strand ID: ETXS1261; Underlying Base Sequence: SEQ ID NO: 54
  modified_base 1: mod_base = OTHER; note = 2' Fluoro-cytidine
  modified_base 2: mod_base = OTHER; note = 2'O-methyl-adenosine
  modified_base 3: mod_base = OTHER; note = 2'Fluoro-adenosine
  modified_base 4: mod_base = OTHER; note = 2'O-methyl-adenosine
  modified_base 5: mod_base = OTHER; note = 2' Fluoro-guanosine
  modified_base 6: mod_base = um
  modified_base 7: mod_base = OTHER; note = 2' Fluoro-guanosine
  modified_base 8: mod_base = cm
  modified_base 9: mod_base = OTHER; note = 2' Fluoro-cytidine
  modified_base 10: mod_base = um
  modified_base 11: mod_base = OTHER; note = 2' Fluoro-guanosine
  modified_base 12: mod_base = OTHER; note = 2'O-methyl-adenosine
  modified_base 13: mod_base = OTHER; note = 2'Fluoro-adenosine
  modified_base 14: mod_base = OTHER; note = 2'O-methyl-adenosine
  modified_base 15: mod_base = OTHER; note = 2'Fluoro-adenosine
  modified_base 16: mod_base = gm
  modified_base 17: mod_base = OTHER; note = 2'Fluoro-adenosine
  modified_base 18: mod_base = OTHER; note = 2'O-methyl-adenosine
  modified_base 19: mod_base = OTHER; note = 2'Fluoro-adenosine
  misc_feature 1^2: note = phosphorothioate linkage
  misc_feature 2^3: note = phosphorothioate linkage
caaagtgccttaaaagaaa

SEQ ID NO: 95 - RNA, 19 nt, synthetic construct
  source 1..19: mol_type = other RNA
  misc_feature 1..19: note = Description: B4GALT1 siRNA sense strands (modified); Sense strand ID: ETXS1263; Underlying Base Sequence: SEQ ID NO: 55
  modified_base 1: mod_base = OTHER; note = 2' Fluoro-guanosine
  modified_base 2: mod_base = gm
  modified_base 3: mod_base = OTHER; note = 2'Fluoro-adenosine
  modified_base 4: mod_base = OTHER; note = 2'O-methyl-adenosine
  modified_base 5: mod_base = OTHER; note = 2' Fluoro-guanosine
  modified_base 6: mod_base = gm
  modified_base 7: mod_base = OTHER; note = 2' Fluoro-guanosine
  modified_base 8: mod_base = gm
  modified_base 9: mod_base = OTHER; note = 2' Fluoro-cytidine
  modified_base 10: mod_base = cm
  modified_base 11: mod_base = OTHER; note = 2' Fluoro-guanosine
  modified_base 12: mod_base = um
  modified_base 13: mod_base = OTHER; note = 2' Fluoro-guanosine
  modified_base 14: mod_base = um
  modified_base 15: mod_base = OTHER; note = 2'Fluoro-adenosine
  modified_base 16: mod_base = OTHER; note = 2'O-methyl-adenosine
  modified_base 17: mod_base = OTHER; note = 2' Fluoro-guanosine
  modified_base 18: mod_base = um
  modified_base 19: mod_base = OTHER; note = 2'Fluoro-adenosine
  misc_feature 1^2: note = phosphorothioate linkage
  misc_feature 2^3: note = phosphorothioate linkage
tgaatgtgccttttaatta

SEQ ID NO: 96 - RNA, 19 nt, synthetic construct
  source 1..19: mol_type = other RNA
  misc_feature 1..19: note = Description: B4GALT1 siRNA sense strands (modified); Sense strand ID: ETXS1265; Underlying Base Sequence: SEQ ID NO: 56
  modified_base 1: mod_base = OTHER; note = 2'Fluoro-adenosine
  modified_base 2: mod_base = cm
  modified_base 3: mod_base = OTHER; note = 2' Fluoro-guanosine
  modified_base 4: mod_base = um
  modified_base 5: mod_base = OTHER; note = 2' Fluoro-guanosine
  modified_base 6: mod_base = OTHER; note = 2'O-methyl-adenosine
  modified_base 7: mod_base = OTHER; note = 2'Fluoro-adenosine
  modified_base 8: mod_base = um
  modified_base 9: mod_base = OTHER; note = 2' Fluoro-guanosine
  modified_base 10: mod_base = um
  modified_base 11: mod_base = OTHER; note = 2' Fluoro-cytidine
  modified_base 12: mod_base = cm
  modified_base 13: mod_base = OTHER; note = 2' Fluoro-guanosine
  modified_base 14: mod_base = OTHER; note = 2'O-methyl-adenosine
  modified_base 15: mod_base = OTHER; note = 2' Fluoro-guanosine
  modified_base 16: mod_base = gm
  modified_base 17: mod_base = OTHER; note = 2' Fluoro-guanosine
  modified_base 18: mod_base = OTHER; note = 2'O-methyl-adenosine
  modified_base 19: mod_base = OTHER; note = 2' Fluoro-guanosine
  misc_feature 1^2: note = phosphorothioate linkage
  misc_feature 2^3: note = phosphorothioate linkage
acttgaatttcctatgtat

SEQ ID NO: 97 - RNA, 19 nt, synthetic construct
  source 1..19: mol_type = other RNA
  misc_feature 1..19: note = Description: B4GALT1 siRNA sense strands (modified); Sense strand ID: ETXS1267; Underlying Base Sequence: SEQ ID NO: 57
  modified_base 1: mod_base = OTHER; note = 2' Fluoro-cytidine
  modified_base 2: mod_base = um
  modified_base 3: mod_base = OTHER; note = 2' Fluoro-guanosine
  modified_base 4: mod_base = OTHER; note = 2'O-methyl-adenosine
  modified_base 5: mod_base = OTHER; note = 2' Fluoro-cytidine
  modified_base 6: mod_base = um
  modified_base 7: mod_base = OTHER; note = 2' Fluoro-guanosine
  modified_base 8: mod_base = um
  modified_base 9: mod_base = OTHER; note = 2' Fluoro-guanosine
  modified_base 10: mod_base = cm
  modified_base 11: mod_base = OTHER; note = 2' Fluoro-cytidine
  modified_base 12: mod_base = OTHER; note = 2'O-methyl-adenosine
  modified_base 13: mod_base = OTHER; note = 2'Fluoro-adenosine
  modified_base 14: mod_base = OTHER; note = 2'O-methyl-adenosine
  modified_base 15: mod_base = OTHER; note = 2' Fluoro-guanosine
  modified_base 16: mod_base = um
  modified_base 17: mod_base = OTHER; note = 2' Fluoro-guanosine
  modified_base 18: mod_base = cm
  modified_base 19: mod_base = OTHER; note = 2' Fluoro-cytidine
  misc_feature 1^2: note = phosphorothioate linkage
  misc_feature 2^3: note = phosphorothioate linkage
ctgacttttccaaagtgcc

SEQ ID NO: 98 - RNA, 19 nt, synthetic construct
  source 1..19: mol_type = other RNA
  misc_feature 1..19: note = Description: B4GALT1 siRNA sense strands (modified); Sense strand ID: ETXS1269; Underlying Base Sequence: SEQ ID NO: 58
  modified_base 1: mod_base = OTHER; note = 2' Fluoro-cytidine
  modified_base 2: mod_base = OTHER; note = 2'O-methyl-adenosine
  modified_base 3: mod_base = OTHER; note = 2'Fluoro-adenosine
  modified_base 4: mod_base = um
  modified_base 5: mod_base = OTHER; note = 2' Fluoro-guanosine
  modified_base 6: mod_base = gm
  modified_base 7: mod_base = OTHER; note = 2'Fluoro-adenosine
  modified_base 8: mod_base = um
  modified_base 9: mod_base = OTHER; note = 2' Fluoro-guanosine
  modified_base 10: mod_base = um
  modified_base 11: mod_base = OTHER; note = 2' Fluoro-cytidine
  modified_base 12: mod_base = cm
  modified_base 13: mod_base = OTHER; note = 2' Fluoro-guanosine
  modified_base 14: mod_base = OTHER; note = 2'O-methyl-adenosine
  modified_base 15: mod_base = OTHER; note = 2'Fluoro-adenosine
  modified_base 16: mod_base = um
  modified_base 17: mod_base = OTHER; note = 2'Fluoro-adenosine
  modified_base 18: mod_base = OTHER; note = 2'O-methyl-adenosine
  modified_base 19: mod_base = OTHER; note = 2' Fluoro-guanosine
  misc_feature 1^2: note = phosphorothioate linkage
  misc_feature 2^3: note = phosphorothioate linkage
caatggatttcctaataat

SEQ ID NO: 99 - RNA, 19 nt, synthetic construct
  source 1..19: mol_type = other RNA
  misc_feature 1..19: note = Description: B4GALT1 siRNA sense strands (modified); Sense strand ID: ETXS1271; Underlying Base Sequence: SEQ ID NO: 59
  modified_base 1: mod_base = OTHER; note = 2' Fluoro-guanosine
  modified_base 2: mod_base = um
  modified_base 3: mod_base = OTHER; note = 2' Fluoro-cytidine
  modified_base 4: mod_base = OTHER; note = 2'O-methyl-adenosine
  modified_base 5: mod_base = OTHER; note = 2' Fluoro-guanosine
  modified_base 6: mod_base = um
  modified_base 7: mod_base = OTHER; note = 2'Fluoro-adenosine
  modified_base 8: mod_base = um
  modified_base 9: mod_base = OTHER; note = 2' Fluoro-guanosine
  modified_base 10: mod_base = um
  modified_base 11: mod_base = OTHER; note = 2' Fluoro-guanosine
  modified_base 12: mod_base = gm
  modified_base 13: mod_base = OTHER; note = 2' Fluoro-guanosine
  modified_base 14: mod_base = OTHER; note = 2'O-methyl-adenosine
  modified_base 15: mod_base = OTHER; note = 2' Fluoro-guanosine
  modified_base 16: mod_base = gm
  modified_base 17: mod_base = OTHER; note = 2' Fluoro-guanosine
  modified_base 18: mod_base = gm
  modified_base 19: mod_base = OTHER; note = 2' Fluoro-guanosine
  misc_feature 1^2: note = phosphorothioate linkage
  misc_feature 2^3: note = phosphorothioate linkage
ttcagtattttggaggtgt

SEQ ID NO: 100 - RNA, 19 nt, synthetic construct
  source 1..19: mol_type = other RNA
  misc_feature 1..19: note = Description: B4GALT1 siRNA sense strands (modified); Sense strand ID: ETXS1273; Underlying Base Sequence: SEQ ID NO: 60
  modified_base 1: mod_base = OTHER; note = 2' Fluoro-cytidine
  modified_base 2: mod_base = cm
  modified_base 3: mod_base = OTHER; note = 2' Fluoro-guanosine
  modified_base 4: mod_base = gm
  modified_base 5: mod_base = OTHER; note = 2'Fluoro-adenosine
  modified_base 6: mod_base = cm
  modified_base 7: mod_base = OTHER; note = 2' Fluoro-guanosine
  modified_base 8: mod_base = um
  modified_base 9: mod_base = OTHER; note = 2' Fluoro-guanosine
  modified_base 10: mod_base = um
  modified_base 11: mod_base = OTHER; note = 2' Fluoro-cytidine
  modified_base 12: mod_base = cm
  modified_base 13: mod_base = OTHER; note = 2'Fluoro-adenosine
  modified_base 14: mod_base = OTHER; note = 2'O-methyl-adenosine
  modified_base 15: mod_base = OTHER; note = 2'Fluoro-adenosine
  modified_base 16: mod_base = gm
  modified_base 17: mod_base = OTHER; note = 2' Fluoro-guanosine
  modified_base 18: mod_base = gm
  modified_base 19: mod_base = OTHER; note = 2' Fluoro-cytidine
  misc_feature 1^2: note = phosphorothioate linkage
  misc_feature 2^3: note = phosphorothioate linkage
cctgacttttccaaagtgc

SEQ ID NO: 101 - RNA, 19 nt, synthetic construct
  source 1..19: mol_type = other RNA
  misc_feature 1..19: note = Description: B4GALT1 siRNA sense strands (modified); Sense strand ID: ETXS1275; Underlying Base Sequence: SEQ ID NO: 61
  modified_base 1: mod_base = OTHER; note = 2' Fluoro-guanosine
  modified_base 2: mod_base = gm
  modified_base 3: mod_base = OTHER; note = 2'Fluoro-adenosine
  modified_base 4: mod_base = um
  modified_base 5: mod_base = OTHER; note = 2' Fluoro-guanosine
  modified_base 6: mod_base = um
  modified_base 7: mod_base = OTHER; note = 2' Fluoro-cytidine
  modified_base 8: mod_base = cm
  modified_base 9: mod_base = OTHER; note = 2' Fluoro-guanosine
  modified_base 10: mod_base = OTHER; note = 2'O-methyl-adenosine
  modified_base 11: mod_base = OTHER; note = 2'Fluoro-adenosine
  modified_base 12: mod_base = um
  modified_base 13: mod_base = OTHER; note = 2'Fluoro-adenosine
  modified_base 14: mod_base = OTHER; note = 2'O-methyl-adenosine
  modified_base 15: mod_base = OTHER; note = 2' Fluoro-guanosine
  modified_base 16: mod_base = um
  modified_base 17: mod_base = OTHER; note = 2'Fluoro-adenosine
  modified_base 18: mod_base = um
  modified_base 19: mod_base = OTHER; note = 2' Fluoro-guanosine
  misc_feature 1^2: note = phosphorothioate linkage
  misc_feature 2^3: note = phosphorothioate linkage
ggatttcctaataattatt

SEQ ID NO: 102 - RNA, 23 nt, Homo sapiens
  misc_feature 1..23: note = Description of sequence: B4GALT1 mRNA target sequences; starting position on NM_001497.4: 2209
  source 1..23: mol_type = mRNA
gtaaacttgaatttcctatgtat

SEQ ID NO: 103 - RNA, 23 nt, Homo sapiens
  misc_feature 1..23: note = Description of sequence: B4GALT1 mRNA target sequences; starting position on NM_001497.4: 2204
  source 1..23: mol_type = mRNA
gctatgtaaacttgaatttccta

SEQ ID NO: 104 - RNA, 23 nt, Homo sapiens
  misc_feature 1..23: note = Description of sequence: B4GALT1 mRNA target sequences; starting position on NM_001497.4: 2206
  source 1..23: mol_type = mRNA
tatgtaaacttgaatttcctatg

SEQ ID NO: 105 - RNA, 23 nt, Homo sapiens
  misc_feature 1..23: note = Description of sequence: B4GALT1 mRNA target sequences; starting position on NM_001497.4: 2212
  source 1..23: mol_type = mRNA
aacttgaatttcctatgtatttt

SEQ ID NO: 106 - RNA, 23 nt, Homo sapiens
  misc_feature 1..23: note = Description of sequence: B4GALT1 mRNA target sequences; starting position on NM_001497.4: 2211
  source 1..23: mol_type = mRNA
aaacttgaatttcctatgtattt

SEQ ID NO: 107 - RNA, 23 nt, Homo sapiens
  misc_feature 1..23: note = Description of sequence: B4GALT1 mRNA target sequences; starting position on NM_001497.4: 2205
  source 1..23: mol_type = mRNA
ctatgtaaacttgaatttcctat

SEQ ID NO: 108 - RNA, 23 nt, Homo sapiens
  misc_feature 1..23: note = Description of sequence: B4GALT1 mRNA target sequences; starting position on NM_001497.4: 2200
  source 1..23: mol_type = mRNA
gcatgctatgtaaacttgaattt

SEQ ID NO: 109 - RNA, 23 nt, Homo sapiens
  misc_feature 1..23: note = Description of sequence: B4GALT1 mRNA target sequences; starting position on NM_001497.4: 2035
  source 1..23: mol_type = mRNA
tgtctgatttctgaatgtaaagt

SEQ ID NO: 110 - RNA, 23 nt, Homo sapiens
  misc_feature 1..23: note = Description of sequence: B4GALT1 mRNA target sequences; starting position on NM_001497.4: 2208
  source 1..23: mol_type = mRNA
tgtaaacttgaatttcctatgta

SEQ ID NO: 111 - RNA, 23 nt, Homo sapiens
  misc_feature 1..23: note = Description of sequence: B4GALT1 mRNA target sequences; starting position on NM_001497.4: 1070
  source 1..23: mol_type = mRNA
tcaatggatttcctaataattat

SEQ ID NO: 112 - RNA, 23 nt, Homo sapiens
  misc_feature 1..23: note = Description of sequence: B4GALT1 mRNA target sequences; starting position on NM_001497.4: 1071
  source 1..23: mol_type = mRNA
caatggatttcctaataattatt

SEQ ID NO: 113 - RNA, 23 nt, Homo sapiens
  misc_feature 1..23: note = Description of sequence: B4GALT1 mRNA target sequences; starting position on NM_001497.4: 2199
  source 1..23: mol_type = mRNA
ggcatgctatgtaaacttgaatt

SEQ ID NO: 114 - RNA, 23 nt, Homo sapiens
  misc_feature 1..23: note = Description of sequence: B4GALT1 mRNA target sequences; starting position on NM_001497.4: 1026
  source 1..23: mol_type = mRNA
ttttggaggtgtctctgctctaa

SEQ ID NO: 115 - RNA, 23 nt, Homo sapiens
  misc_feature 1..23: note = Description of sequence: B4GALT1 mRNA target sequences; starting position on NM_001497.4: 1225
  source 1..23: mol_type = mRNA
aatcctcagaggtttgaccgaat

SEQ ID NO: 116 - RNA, 23 nt, Homo sapiens
  misc_feature 1..23: note = Description of sequence: B4GALT1 mRNA target sequences; starting position on NM_001497.4: 1069
  source 1..23: mol_type = mRNA
atcaatggatttcctaataatta

SEQ ID NO: 117 - RNA, 23 nt, Homo sapiens
  misc_feature 1..23: note = Description of sequence: B4GALT1 mRNA target sequences; starting position on NM_001497.4: 3445
  source 1..23: mol_type = mRNA
gacttttccaaagtgccttaaaa

SEQ ID NO: 118 - RNA, 23 nt, Homo sapiens
  misc_feature 1..23: note = Description of sequence: B4GALT1 mRNA target sequences; starting position on NM_001497.4: 2201
  source 1..23: mol_type = mRNA
catgctatgtaaacttgaatttc

SEQ ID NO: 119 - RNA, 23 nt, Homo sapiens
  misc_feature 1..23: note = Description of sequence: B4GALT1 mRNA target sequences; starting position on NM_001497.4: 1067
  source 1..23: mol_type = mRNA
ccatcaatggatttcctaataat

SEQ ID NO: 120 - RNA, 23 nt, Homo sapiens
  misc_feature 1..23: note = Description of sequence: B4GALT1 mRNA target sequences; starting position on NM_001497.4: 2210
  source 1..23: mol_type = mRNA
taaacttgaatttcctatgtatt

SEQ ID NO: 121 - RNA, 23 nt, Homo sapiens
  misc_feature 1..23: note = Description of sequence: B4GALT1 mRNA target sequences; starting position on NM_001497.4: 1039
  source 1..23: mol_type = mRNA
tctgctctaagtaaacaacagtt

SEQ ID NO: 122 - RNA, 23 nt, Homo sapiens
  misc_feature 1..23: note = Description of sequence: B4GALT1 mRNA target sequences; starting position on NM_001497.4: 2202
  source 1..23: mol_type = mRNA
atgctatgtaaacttgaatttcc

SEQ ID NO: 123 - RNA, 23 nt, Homo sapiens
  misc_feature 1..23: note = Description of sequence: B4GALT1 mRNA target sequences; starting position on NM_001497.4: 1031
  source 1..23: mol_type = mRNA
gaggtgtctctgctctaagtaaa

SEQ ID NO: 124 - RNA, 23 nt, Homo sapiens
  misc_feature 1..23: note = Description of sequence: B4GALT1 mRNA target sequences; starting position on NM_001497.4: 2822
  source 1..23: mol_type = mRNA
agcatgaatgtgccttttaatta

SEQ ID NO: 125 - RNA, 23 nt, Homo sapiens
  misc_feature 1..23: note = Description of sequence: B4GALT1 mRNA target sequences; starting position on NM_001497.4: 1030
  source 1..23: mol_type = mRNA
ggaggtgtctctgctctaagtaa

SEQ ID NO: 126 - RNA, 23 nt, Homo sapiens
  misc_feature 1..23: note = Description of sequence: B4GALT1 mRNA target sequences; starting position on NM_001497.4: 3449
  source 1..23: mol_type = mRNA
tttccaaagtgccttaaaagaaa

SEQ ID NO: 127 - RNA, 23 nt, Homo sapiens
  misc_feature 1..23: note = Description of sequence: B4GALT1 mRNA target sequences; starting position on NM_001497.4: 2203
  source 1..23: mol_type = mRNA
tgctatgtaaacttgaatttcct

SEQ ID NO: 128 - RNA, 23 nt, Homo sapiens
  misc_feature 1..23: note = Description of sequence: B4GALT1 mRNA target sequences; starting position on NM_001497.4: 1019
  source 1..23: mol_type = mRNA
ttcagtattttggaggtgtctct

SEQ ID NO: 129 - RNA, 23 nt, Homo sapiens
  misc_feature 1..23: note = Description of sequence: B4GALT1 mRNA target sequences; starting position on NM_001497.4: 2820
  source 1..23: mol_type = mRNA
ccagcatgaatgtgccttttaat

SEQ ID NO: 130 - RNA, 23 nt, Homo sapiens
  misc_feature 1..23: note = Description of sequence: B4GALT1 mRNA target sequences; starting position on NM_001497.4: 1032
  source 1..23: mol_type = mRNA
aggtgtctctgctctaagtaaac

SEQ ID NO: 131 - RNA, 23 nt, Homo sapiens
  misc_feature 1..23: note = Description of sequence: B4GALT1 mRNA target sequences; starting position on NM_001497.4: 1102
  source 1..23: mol_type = mRNA
ggaggagaagatgatgacatttt

SEQ ID NO: 132 - RNA, 23 nt, Homo sapiens
  misc_feature 1..23: note = Description of sequence: B4GALT1 mRNA target sequences; starting position on NM_001497.4: 1028
  source 1..23: mol_type = mRNA
ttggaggtgtctctgctctaagt

SEQ ID NO: 133 - RNA, 23 nt, Homo sapiens
  misc_feature 1..23: note = Description of sequence: B4GALT1 mRNA target sequences; starting position on NM_001497.4: 2034
  source 1..23: mol_type = mRNA
ttgtctgatttctgaatgtaaag

SEQ ID NO: 134 - RNA, 23 nt, Homo sapiens
  misc_feature 1..23: note = Description of sequence: B4GALT1 mRNA target sequences; starting position on NM_001497.4: 967
  source 1..23: mol_type = mRNA
ccacggcacatttccgttgcaat

SEQ ID NO: 135 - RNA, 23 nt, Homo sapiens
  misc_feature 1..23: note = Description of sequence: B4GALT1 mRNA target sequences; starting position on NM_001497.4: 1074
  source 1..23: mol_type = mRNA
tggatttcctaataattattggg

SEQ ID NO: 136 - RNA, 23 nt, Homo sapiens
  misc_feature 1..23: note = Description of sequence: B4GALT1 mRNA target sequences; starting position on NM_001497.4: 1017
  source 1..23: mol_type = mRNA
tgttcagtattttggaggtgtct

SEQ ID NO: 137 - RNA, 23 nt, Homo sapiens
  misc_feature 1..23: note = Description of sequence: B4GALT1 mRNA target sequences; starting position on NM_001497.4: 1068
  source 1..23: mol_type = mRNA
catcaatggatttcctaataatt

SEQ ID NO: 138 - RNA, 23 nt, Homo sapiens
  misc_feature 1..23: note = Description of sequence: B4GALT1 mRNA target sequences; starting position on NM_001497.4: 1224
  source 1..23: mol_type = mRNA
caatcctcagaggtttgaccgaa

SEQ ID NO: 139 - RNA, 23 nt, Homo sapiens
  misc_feature 1..23: note = Description of sequence: B4GALT1 mRNA target sequences; starting position on NM_001497.4: 1276
  source 1..23: mol_type = mRNA
gatggtttgaactcactcaccta

SEQ ID NO: 140 - RNA, 23 nt, Homo sapiens
  misc_feature 1..23: note = Description of sequence: B4GALT1 mRNA target sequences; starting position on NM_001497.4: 3448
  source 1..23: mol_type = mRNA
ttttccaaagtgccttaaaagaa

SEQ ID NO: 141 - RNA, 23 nt, Homo sapiens
  misc_feature 1..23: note = Description of sequence: B4GALT1 mRNA target sequences; starting position on NM_001497.4: 3446
  source 1..23: mol_type = mRNA
acttttccaaagtgccttaaaag

SEQ ID NO: 142 - RNA, 23 nt, Homo sapiens
  misc_feature 1..23: note = Description of sequence: B4GALT1 mRNA target sequences; starting position on NM_001497.4: 1033
  source 1..23: mol_type = mRNA
ggtgtctctgctctaagtaaaca

SEQ ID NO: 143 - RNA, 23 nt, Homo sapiens
  misc_feature 1..23: note = Description of sequence: B4GALT1 mRNA target sequences; starting position on NM_001497.4: 3440
  source 1..23: mol_type = mRNA
atcctgacttttccaaagtgcct

SEQ ID NO: 144 - RNA, 23 nt, Homo sapiens
  misc_feature 1..23: note = Description of sequence: B4GALT1 mRNA target sequences; starting position on NM_001497.4: 1023
  source 1..23: mol_type = mRNA
gtattttggaggtgtctctgctc

SEQ ID NO: 145 - RNA, 23 nt, Homo sapiens
  misc_feature 1..23: note = Description of sequence: B4GALT1 mRNA target sequences; starting position on NM_001497.4: 1277
  source 1..23: mol_type = mRNA
atggtttgaactcactcacctac

SEQ ID NO: 146 - RNA, 23 nt, Homo sapiens
  misc_feature 1..23: note = Description of sequence: B4GALT1 mRNA target sequences; starting position on NM_001497.4: 1025
  source 1..23: mol_type = mRNA
attttggaggtgtctctgctcta

SEQ ID NO: 147 - RNA, 23 nt, Homo sapiens
  misc_feature 1..23: note = Description of sequence: B4GALT1 mRNA target sequences; starting position on NM_001497.4: 1035
  source 1..23: mol_type = mRNA
tgtctctgctctaagtaaacaac

SEQ ID NO: 148 - RNA, 23 nt, Homo sapiens
  misc_feature 1..23: note = Description of sequence: B4GALT1 mRNA target sequences; starting position on NM_001497.4: 970
  source 1..23: mol_type = mRNA
cggcacatttccgttgcaatgga

SEQ ID NO: 149 - RNA, 23 nt, Homo sapiens
  misc_feature 1..23: note = Description of sequence: B4GALT1 mRNA target sequences; starting position on NM_001497.4: 2823
  source 1..23: mol_type = mRNA
gcatgaatgtgccttttaattag

SEQ ID NO: 150 - RNA, 23 nt, Homo sapiens
  misc_feature 1..23: note = Description of sequence: B4GALT1 mRNA target sequences; starting position on NM_001497.4: 968
  source 1..23: mol_type = mRNA
cacggcacatttccgttgcaatg

SEQ ID NO: 151 - RNA, 23 nt, Homo sapiens
  misc_feature 1..23: note = Description of sequence: B4GALT1 mRNA target sequences; starting position on NM_001497.4: 1330
  source 1..23: mol_type = mRNA
tatacccaaatcacagtggacat

SEQ ID NO: 152 - RNA, 23 nt, Homo sapiens
  misc_feature 1..23: note = Description of sequence: B4GALT1 mRNA target sequences; starting position on NM_001497.4: 1339
  source 1..23: mol_type = mRNA
atcacagtggacatcgggacacc

SEQ ID NO: 153 - RNA, 23 nt, Homo sapiens
  misc_feature 1..23: note = Description of sequence: B4GALT1 mRNA target sequences; starting position on NM_001497.4: 1034
  source 1..23: mol_type = mRNA
gtgtctctgctctaagtaaacaa

SEQ ID NO: 154 - RNA, 23 nt, Homo sapiens
  misc_feature 1..23: note = Description of sequence: B4GALT1 mRNA target sequences; starting position on NM_001497.4: 3437
  source 1..23: mol_type = mRNA
cagatcctgacttttccaaagtg

SEQ ID NO: 155 - RNA, 23 nt, Homo sapiens
  misc_feature 1..23: note = Description of sequence: B4GALT1 mRNA target sequences; starting position on NM_001497.4: 2821
  source 1..23: mol_type = mRNA
cagcatgaatgtgccttttaatt

SEQ ID NO: 156 - RNA, 23 nt, Homo sapiens
  misc_feature 1..23: note = Description of sequence: B4GALT1 mRNA target sequences; starting position on NM_001497.4: 1013
  source 1..23: mol_type = mRNA
cttatgttcagtattttggaggt

SEQ ID NO: 157 - RNA, 23 nt, Homo sapiens
  misc_feature 1..23: note = Description of sequence: B4GALT1 mRNA target sequences; starting position on NM_001497.4: 1072
  source 1..23: mol_type = mRNA
aatggatttcctaataattattg

SEQ ID NO: 158 - RNA, 23 nt, Homo sapiens
  misc_feature 1..23: note = Description of sequence: B4GALT1 mRNA target sequences; starting position on NM_001497.4: 1029
  source 1..23: mol_type = mRNA
tggaggtgtctctgctctaagta

SEQ ID NO: 159 - RNA, 23 nt, Homo sapiens
  misc_feature 1..23: note = Description of sequence: B4GALT1 mRNA target sequences; starting position on NM_001497.4: 1301
  source 1..23: mol_type = mRNA
aggtgctggatgtacagagatac

SEQ ID NO: 160 - RNA, 23 nt, Homo sapiens
  misc_feature 1..23: note = Description of sequence: B4GALT1 mRNA target sequences; starting position on NM_001497.4: 1040
  source 1..23: mol_type = mRNA
ctgctctaagtaaacaacagttt

SEQ ID NO: 161 - RNA, 23 nt, Homo sapiens
  misc_feature 1..23: note = Description of sequence: B4GALT1 mRNA target sequences; starting position on NM_001497.4: 1037
  source 1..23: mol_type = mRNA
tctctgctctaagtaaacaacag

SEQ ID NO: 162 - RNA, 23 nt, Homo sapiens
  misc_feature 1..23: note = Description of sequence: B4GALT1 mRNA target sequences; starting position on NM_001497.4: 1015
  source 1..23: mol_type = mRNA
tatgttcagtattttggaggtgt

SEQ ID NO: 163 - RNA, 23 nt, Homo sapiens
  misc_feature 1..23: note = Description of sequence: B4GALT1 mRNA target sequences; starting position on NM_001497.4: 1024
  source 1..23: mol_type = mRNA
tattttggaggtgtctctgctct

SEQ ID NO: 164 - RNA, 23 nt, Homo sapiens
  misc_feature 1..23: note = Description of sequence: B4GALT1 mRNA target sequences; starting position on NM_001497.4: 1333
  source 1..23: mol_type = mRNA
acccaaatcacagtggacatcgg

SEQ ID NO: 165 - RNA, 23 nt, Homo sapiens
  misc_feature 1..23: note = Description of sequence: B4GALT1 mRNA target sequences; starting position on NM_001497.4: 1038
  source 1..23: mol_type = mRNA
ctctgctctaagtaaacaacagt

SEQ ID NO: 166 - RNA, 23 nt, Homo sapiens
  misc_feature 1..23: note = Description of sequence: B4GALT1 mRNA target sequences; starting position on NM_001497.4: 1027
  source 1..23: mol_type = mRNA
tttggaggtgtctctgctctaag

SEQ ID NO: 167 - RNA, 23 nt, Homo sapiens
  misc_feature 1..23: note = Description of sequence: B4GALT1 mRNA target sequences; starting position on NM_001497.4: 3447
  source 1..23: mol_type = mRNA
cttttccaaagtgccttaaaaga

SEQ ID NO: 168 - RNA, 23 nt, Homo sapiens
  misc_feature 1..23: note = Description of sequence: B4GALT1 mRNA target sequences; starting position on NM_001497.4: 1302
  source 1..23: mol_type = mRNA
ggtgctggatgtacagagatacc

SEQ ID NO: 169 - RNA, 23 nt, Homo sapiens
  misc_feature 1..23: note = Description of sequence: B4GALT1 mRNA target sequences; starting position on NM_001497.4: 3439
  source 1..23: mol_type = mRNA
gatcctgacttttccaaagtgcc

SEQ ID NO: 170 - RNA, 23 nt, Homo sapiens
  misc_feature 1..23: note = Description of sequence: B4GALT1 mRNA target sequences; starting position on NM_001497.4: 684
  source 1..23: mol_type = mRNA
ctgcgtctctcctcacaaggtgg

SEQ ID NO: 171 - RNA, 23 nt, Homo sapiens
  misc_feature 1..23: note = Description of sequence: B4GALT1 mRNA target sequences; starting position on NM_001497.4: 1073
  source 1..23: mol_type = mRNA
atggatttcctaataattattgg

SEQ ID NO: 172 - RNA, 23 nt, Homo sapiens
  misc_feature 1..23: note = Description of sequence: B4GALT1 mRNA target sequences; starting position on NM_001497.4: 969
  source 1..23: mol_type = mRNA
acggcacatttccgttgcaatgg

SEQ ID NO: 173 - RNA, 23 nt, Homo sapiens
  misc_feature 1..23: note = Description of sequence: B4GALT1 mRNA target sequences; starting position on NM_001497.4: 1328
  source 1..23: mol_type = mRNA
tgtatacccaaatcacagtggac

SEQ ID NO: 174 - RNA, 23 nt, Homo sapiens
  misc_feature 1..23: note = Description of sequence: B4GALT1 mRNA target sequences; starting position on NM_001497.4: 1018
  source 1..23: mol_type = mRNA
gttcagtattttggaggtgtctc

SEQ ID NO: 175 - RNA, 23 nt, Homo sapiens
  misc_feature 1..23: note = Description of sequence: B4GALT1 mRNA target sequences; starting position on NM_001497.4: 862
  source 1..23: mol_type = mRNA
ggctttcaagaagccttgaagga

SEQ ID NO: 176 - RNA, 23 nt, Homo sapiens
  misc_feature 1..23: note = Description of sequence: B4GALT1 mRNA target sequences; starting position on NM_001497.4: 1087
  source 1..23: mol_type = mRNA
aattattggggctggggaggaga

SEQ ID NO: 177 - RNA, 23 nt, Homo sapiens
  misc_feature 1..23: note = Description of sequence: B4GALT1 mRNA target sequences; starting position on NM_001497.4: 1347
  source 1..23: mol_type = mRNA
ggacatcgggacaccgagctagc

SEQ ID NO: 178 - RNA, 23 nt, Homo sapiens
  misc_feature 1..23: note = Description of sequence: B4GALT1 mRNA target sequences; starting position on NM_001497.4: 3438
  source 1..23: mol_type = mRNA
agatcctgacttttccaaagtgc

SEQ ID NO: 179 - RNA, 23 nt, Homo sapiens
  misc_feature 1..23: note = Description of sequence: B4GALT1 mRNA target sequences; starting position on NM_001497.4: 1329
  source 1..23: mol_type = mRNA
gtatacccaaatcacagtggaca

SEQ ID NO: 180 - RNA, 23 nt, Homo sapiens
  misc_feature 1..23: note = Description of sequence: B4GALT1 mRNA target sequences; starting position on NM_001497.4: 718
  source 1..23: mol_type = mRNA
ccattccgcaaccggcaggagca

SEQ ID NO: 181 - RNA, 23 nt, Homo sapiens
  misc_feature 1..23: note = Description of sequence: B4GALT1 mRNA target sequences; starting position on NM_001497.4: 1303
  source 1..23: mol_type = mRNA
gtgctggatgtacagagataccc

SEQ ID NO: 182 - RNA, 23 nt, Homo sapiens
  misc_feature 1..23: note = Description of sequence: B4GALT1 mRNA target sequences; starting position on NM_001497.4: 682
  source 1..23: mol_type = mRNA
gactgcgtctctcctcacaaggt

SEQ ID NO: 183 - RNA, 23 nt, Homo sapiens
  misc_feature 1..23: note = Description of sequence: B4GALT1 mRNA target sequences; starting position on NM_001497.4: 1336
  source 1..23: mol_type = mRNA
caaatcacagtggacatcgggac

SEQ ID NO: 184 - RNA, 23 nt, Homo sapiens
  misc_feature 1..23: note = Description of sequence: B4GALT1 mRNA target sequences; starting position on NM_001497.4: 1036
  source 1..23: mol_type = mRNA
gtctctgctctaagtaaacaaca

SEQ ID NO: 185 - RNA, 23 nt, Homo sapiens
  misc_feature 1..23: note = Description of sequence: B4GALT1 mRNA target sequences; starting position on NM_001497.4: 1016
  source 1..23: mol_type = mRNA
atgttcagtattttggaggtgtc

SEQ ID NO: 186 - RNA, 23 nt, Homo sapiens
  misc_feature 1..23: note = Description of sequence: B4GALT1 mRNA target sequences; starting position on NM_001497.4: 1088
  source 1..23: mol_type = mRNA
attattggggctggggaggagaa

SEQ ID NO: 187 - RNA, 23 nt, Homo sapiens
  misc_feature 1..23: note = Description of sequence: B4GALT1 mRNA target sequences; starting position on NM_001497.4: 1012
  source 1..23: mol_type = mRNA
ccttatgttcagtattttggagg

SEQ ID NO: 188 - RNA, 23 nt, Homo sapiens
  misc_feature 1..23: note = Description of sequence: B4GALT1 mRNA target sequences; starting position on NM_001497.4: 1331
  source 1..23: mol_type = mRNA
atacccaaatcacagtggacatc

SEQ ID NO: 189 - RNA, 23 nt, Homo sapiens
  misc_feature 1..23: note = Description of sequence: B4GALT1 mRNA target sequences; starting position on NM_001497.4: 1075
  source 1..23: mol_type = mRNA
ggatttcctaataattattgggg

SEQ ID NO: 190 - RNA, 23 nt, Homo sapiens
  misc_feature 1..23: note = Description of sequence: B4GALT1 mRNA target sequences; starting position on NM_001497.4: 1340
  source 1..23: mol_type = mRNA
tcacagtggacatcgggacaccg

SEQ ID NO: 191 - RNA, 23 nt, Homo sapiens
  misc_feature 1..23: note = Description of sequence: B4GALT1 mRNA target sequences; starting position on NM_001497.4: 1327
  source 1..23: mol_type = mRNA
ttgtatacccaaatcacagtgga

SEQ ID NO: 192 - RNA, 23 nt, Homo sapiens
  misc_feature 1..23: note = Description of sequence: B4GALT1 mRNA target sequences; starting position on NM_001497.4: 1091
  source 1..23: mol_type = mRNA
attggggctggggaggagaagat

SEQ ID NO: 193 - RNA, 23 nt, Homo sapiens
  misc_feature 1..23: note = Description of sequence: B4GALT1 mRNA target sequences; starting position on NM_001497.4: 1014
  source 1..23: mol_type = mRNA
ttatgttcagtattttggaggtg

SEQ ID NO: 194 - RNA, 23 nt, Homo sapiens
  misc_feature 1..23: note = Description of sequence: B4GALT1 mRNA target sequences; starting position on NM_001497.4: 1346
  source 1..23: mol_type = mRNA
tggacatcgggacaccgagctag

SEQ ID NO: 195 - RNA, 23 nt, Homo sapiens
  misc_feature 1..23: note = Description of sequence: B4GALT1 mRNA target sequences; starting position on NM_001497.4: 1342
  source 1..23: mol_type = mRNA
acagtggacatcgggacaccgag

SEQ ID NO: 196 - RNA, 23 nt, Homo sapiens
  misc_feature 1..23: note = Description of sequence: B4GALT1 mRNA target sequences; starting position on NM_001497.4: 1086
  source 1..23: mol_type = mRNA
taattattggggctggggaggag

SEQ ID NO: 197 - RNA, 23 nt, Homo sapiens
  misc_feature 1..23: note = Description of sequence: B4GALT1 mRNA target sequences; starting position on NM_001497.4: 1092
  source 1..23: mol_type = mRNA
ttggggctggggaggagaagatg

SEQ ID NO: 198 - RNA, 23 nt, Homo sapiens
  misc_feature 1..23: note = Description of sequence: B4GALT1 mRNA target sequences; starting position on NM_001497.4: 681
  source 1..23: mol_type = mRNA
ggactgcgtctctcctcacaagg

SEQ ID NO: 199 - RNA, 23 nt, Homo sapiens
  misc_feature 1..23: note = Description of sequence: B4GALT1 mRNA target sequences; starting position on NM_001497.4: 1082
  source 1..23: mol_type = mRNA
ctaataattattggggctgggga

SEQ ID NO: 200 - RNA, 23 nt, Homo sapiens
  misc_feature 1..23: note = Description of sequence: B4GALT1 mRNA target sequences; starting position on NM_001497.4: 1338
  source 1..23: mol_type = mRNA
aatcacagtggacatcgggacac

SEQ ID NO: 201 - RNA, 23 nt, Homo sapiens
  misc_feature 1..23: note = Description of sequence: B4GALT1 mRNA target sequences; starting position on NM_001497.4: 683
  source 1..23: mol_type = mRNA
actgcgtctctcctcacaaggtg

SEQ ID NO: 202 - RNA, 23 nt, synthetic construct
  misc_feature 1..23: note = Description of sequence: Description: B4GALT1 siRNA antisense strands (unmodified); Corresponding positions on NM_001497.4: 2209-2230
  source 1..23: mol_type = other RNA
atacataggaaattcaagtttac

SEQ ID NO: 203 - RNA, 23 nt, synthetic construct
  misc_feature 1..23: note = Description of sequence: Description: B4GALT1 siRNA antisense strands (unmodified); Corresponding positions on NM_001497.4: 2204-2225
  source 1..23: mol_type = other RNA
taggaaattcaagtttacatagc

SEQ ID NO: 204 - RNA, 23 nt, synthetic construct
  misc_feature 1..23: note = Description of sequence: Description: B4GALT1 siRNA antisense strands (unmodified); Corresponding positions on NM_001497.4: 2206-2227
  source 1..23: mol_type = other RNA
cataggaaattcaagtttacata

SEQ ID NO: 205 - RNA, 23 nt, synthetic construct
  misc_feature 1..23: note = Description of sequence: Description: B4GALT1 siRNA antisense strands (unmodified); Corresponding positions on NM_001497.4: 2212-2233
  source 1..23: mol_type = other RNA
aaaatacataggaaattcaagtt

SEQ ID NO: 206 - RNA, 23 nt, synthetic construct
  misc_feature 1..23: note = Description of sequence: Description: B4GALT1 siRNA antisense strands (unmodified); Corresponding positions on NM_001497.4: 2211-2232
  source 1..23: mol_type = other RNA
aaatacataggaaattcaagttt

SEQ ID NO: 207 - RNA, 23 nt, synthetic construct
  misc_feature 1..23: note = Description of sequence: Description: B4GALT1 siRNA antisense strands (unmodified); Corresponding positions on NM_001497.4: 2205-2226
  source 1..23: mol_type = other RNA
ataggaaattcaagtttacatag

SEQ ID NO: 208 - RNA, 23 nt, synthetic construct
  misc_feature 1..23: note = Description of sequence: Description: B4GALT1 siRNA antisense strands (unmodified); Corresponding positions on NM_001497.4: 2200-2221
  source 1..23: mol_type = other RNA
aaattcaagtttacatagcatgc

SEQ ID NO: 209 - RNA, 23 nt, synthetic construct
  misc_feature 1..23: note = Description of sequence: Description: B4GALT1 siRNA antisense strands (unmodified); Corresponding positions on NM_001497.4: 2035-2056
  source 1..23: mol_type = other RNA
actttacattcagaaatcagaca

SEQ ID NO: 210 - RNA, 23 nt, synthetic construct
  misc_feature 1..23: note = Description of sequence: Description: B4GALT1 siRNA antisense strands (unmodified); Corresponding positions on NM_001497.4: 2208-2229
  source 1..23: mol_type = other RNA
tacataggaaattcaagtttaca

SEQ ID NO: 211 - RNA, 23 nt, synthetic construct
  misc_feature 1..23: note = Description of sequence: Description: B4GALT1 siRNA antisense strands (unmodified); Corresponding positions on NM_001497.4: 1070-1091
  source 1..23: mol_type = other RNA
ataattattaggaaatccattga

SEQ ID NO: 212 - RNA, 23 nt, synthetic construct
  misc_feature 1..23: note = Description of sequence: Description: B4GALT1 siRNA antisense strands (unmodified); Corresponding positions on NM_001497.4: 1071-1092
  source 1..23: mol_type = other RNA
aataattattaggaaatccattg

SEQ ID NO: 213 - RNA, 23 nt, synthetic construct
  misc_feature 1..23: note = Description of sequence: Description: B4GALT1 siRNA antisense strands (unmodified); Corresponding positions on NM_001497.4: 2199-2220
  source 1..23: mol_type = other RNA
aattcaagtttacatagcatgcc

SEQ ID NO: 214 - RNA, 23 nt, synthetic construct
  misc_feature 1..23: note = Description of sequence: Description: B4GALT1 siRNA antisense strands (unmodified); Corresponding positions on NM_001497.4: 1026-1047
  source 1..23: mol_type = other RNA
ttagagcagagacacctccaaaa

SEQ ID NO: 215 - RNA, 23 nt, synthetic construct
  misc_feature 1..23: note = Description of sequence: Description: B4GALT1 siRNA antisense strands (unmodified); Corresponding positions on NM_001497.4: 1225-1246
  source 1..23: mol_type = other RNA
attcggtcaaacctctgaggatt

SEQ ID NO: 216 - RNA, 23 nt, synthetic construct
  misc_feature 1..23: note = Description of sequence: Description: B4GALT1 siRNA antisense strands (unmodified); Corresponding positions on NM_001497.4: 1069-1090
  source 1..23: mol_type = other RNA
taattattaggaaatccattgat

SEQ ID NO: 217 - RNA, 23 nt, synthetic construct
  misc_feature 1..23: note = Description of sequence: Description: B4GALT1 siRNA antisense strands (unmodified); Corresponding positions on NM_001497.4: 3445-3466
  source 1..23: mol_type = other RNA
ttttaaggcactttggaaaagtc

SEQ ID NO: 218 - RNA, 23 nt, synthetic construct
  misc_feature 1..23: note = Description of sequence: Description: B4GALT1 siRNA antisense strands (unmodified); Corresponding positions on NM_001497.4: 2201-2222
  source 1..23: mol_type = other RNA
gaaattcaagtttacatagcatg

SEQ ID NO: 219 - RNA, 23 nt, synthetic construct
  misc_feature 1..23: note = Description of sequence: Description: B4GALT1 siRNA antisense strands (unmodified); Corresponding positions on NM_001497.4: 1067-1088
  source 1..23: mol_type = other RNA
attattaggaaatccattgatgg

SEQ ID NO: 220 - RNA, 23 nt, synthetic construct
  misc_feature 1..23: note = Description of sequence: Description: B4GALT1 siRNA antisense strands (unmodified); Corresponding positions on NM_001497.4: 2210-2231
  source 1..23: mol_type = other RNA
aatacataggaaattcaagttta

SEQ ID NO: 221 - RNA, 23 nt, synthetic construct
  misc_feature 1..23: note = Description of sequence: Description: B4GALT1 siRNA antisense strands (unmodified); Corresponding positions on NM_001497.4: 1039-1060
  source 1..23: mol_type = other RNA
aactgttgtttacttagagcaga

SEQ ID NO: 222 - RNA, 23 nt, synthetic construct
  misc_feature 1..23: note = Description of sequence: Description: B4GALT1 siRNA antisense strands (unmodified); Corresponding positions on NM_001497.4: 2202-2223
  source 1..23: mol_type = other RNA
ggaaattcaagtttacatagcat

SEQ ID NO: 223 - RNA, 23 nt, synthetic construct
  misc_feature 1..23: note = Description of sequence: Description: B4GALT1 siRNA antisense strands (unmodified); Corresponding positions on NM_001497.4: 1031-1052
  source 1..23: mol_type = other RNA
tttacttagagcagagacacctc

SEQ ID NO: 224 - RNA, 23 nt, synthetic construct
  misc_feature 1..23: note = Description of sequence: Description: B4GALT1 siRNA antisense strands (unmodified); Corresponding positions on NM_001497.4: 2822-2843
  source 1..23: mol_type = other RNA
taattaaaaggcacattcatgct

SEQ ID NO: 225 - RNA, 23 nt, synthetic construct
  misc_feature 1..23: note = Description of sequence: Description: B4GALT1 siRNA antisense strands (unmodified); Corresponding positions on NM_001497.4: 1030-1051
  source 1..23: mol_type = other RNA
ttacttagagcagagacacctcc

SEQ ID NO: 226 - RNA, 23 nt, synthetic construct
  misc_feature 1..23: note = Description of sequence: Description: B4GALT1 siRNA antisense strands (unmodified); Corresponding positions on NM_001497.4: 3449-3470
  source 1..23: mol_type = other RNA
tttcttttaaggcactttggaaa

SEQ ID NO: 227 - RNA, 23 nt, synthetic construct
  misc_feature 1..23: note = Description of sequence: Description: B4GALT1 siRNA antisense strands (unmodified); Corresponding positions on NM_001497.4: 2203-2224
  source 1..23: mol_type = other RNA
aggaaattcaagtttacatagca

SEQ ID NO: 228 - RNA, 23 nt, synthetic construct
  misc_feature 1..23: note = Description of sequence: Description: B4GALT1 siRNA antisense strands (unmodified); Corresponding positions on NM_001497.4: 1019-1040
  source 1..23: mol_type = other RNA
agagacacctccaaaatactgaa

SEQ ID NO: 229 - RNA, 23 nt, synthetic construct
  misc_feature 1..23: note = Description of sequence: Description: B4GALT1 siRNA antisense strands (unmodified); Corresponding positions on NM_001497.4: 2820-2841
  source 1..23: mol_type = other RNA
attaaaaggcacattcatgctgg

SEQ ID NO: 230 - RNA, 23 nt, synthetic construct
  misc_feature 1..23: note = Description of sequence: Description: B4GALT1 siRNA antisense strands (unmodified); Corresponding positions on NM_001497.4: 1032-1053
  source 1..23: mol_type = other RNA
gtttacttagagcagagacacct

SEQ ID NO: 231 - RNA, 23 nt, synthetic construct
  misc_feature 1..23: note = Description of sequence: Description: B4GALT1 siRNA antisense strands (unmodified); Corresponding positions on NM_001497.4: 1102-1123
  source 1..23: mol_type = other RNA
aaaatgtcatcatcttctcctcc

SEQ ID NO: 232 - RNA, 23 nt, synthetic construct
  misc_feature 1..23: note = Description of sequence: Description: B4GALT1 siRNA antisense strands (unmodified); Corresponding positions on NM_001497.4: 1028-1049
  source 1..23: mol_type = other RNA
acttagagcagagacacctccaa

SEQ ID NO: 233 - RNA, 23 nt, synthetic construct
  misc_feature 1..23: note = Description of sequence: Description: B4GALT1 siRNA antisense strands (unmodified); Corresponding positions on NM_001497.4: 2034-2055
  source 1..23: mol_type = other RNA
ctttacattcagaaatcagacaa

SEQ ID NO: 234 - RNA, 23 nt, synthetic construct
  misc_feature 1..23: note = Description of sequence: Description: B4GALT1 siRNA antisense strands (unmodified); Corresponding positions on NM_001497.4: 967-988
  source 1..23: mol_type = other RNA
attgcaacggaaatgtgccgtgg

SEQ ID NO: 235 - RNA, 23 nt, synthetic construct
  misc_feature 1..23: note = Description of sequence: Description: B4GALT1 siRNA antisense strands (unmodified); Corresponding positions on NM_001497.4: 1074-1095
  source 1..23: mol_type = other RNA
cccaataattattaggaaatcca

SEQ ID NO: 236 - RNA, 23 nt, synthetic construct
  misc_feature 1..23: note = Description of sequence: Description: B4GALT1 siRNA antisense strands (unmodified); Corresponding positions on NM_001497.4: 1017-1038
  source 1..23: mol_type = other RNA
agacacctccaaaatactgaaca

SEQ ID NO: 237 - RNA, 23 nt, synthetic construct
  misc_feature 1..23: note = Description of sequence: Description: B4GALT1 siRNA antisense strands (unmodified); Corresponding positions on NM_001497.4: 1068-1089
  source 1..23: mol_type = other RNA
aattattaggaaatccattgatg

SEQ ID NO: 238 - RNA, 23 nt, synthetic construct
  misc_feature 1..23: note = Description of sequence: Description: B4GALT1 siRNA antisense strands (unmodified); Corresponding positions on NM_001497.4: 1224-1245
  source 1..23: mol_type = other RNA
ttcggtcaaacctctgaggattg

SEQ ID NO: 239 - RNA, 23 nt, synthetic construct
  misc_feature 1..23: note = Description of sequence: Description: B4GALT1 siRNA antisense strands (unmodified); Corresponding positions on NM_001497.4: 1276-1297
  source 1..23: mol_type = other RNA
taggtgagtgagttcaaaccatc

SEQ ID NO: 240 - RNA, 23 nt, synthetic construct
  misc_feature 1..23: note = Description of sequence: Description: B4GALT1 siRNA antisense strands (unmodified); Corresponding positions on NM_001497.4: 3448-3469
  source 1..23: mol_type = other RNA
ttcttttaaggcactttggaaaa

SEQ ID NO: 241 - RNA, 23 nt, synthetic construct
  misc_feature 1..23: note = Description of sequence: Description: B4GALT1 siRNA antisense strands (unmodified); Corresponding positions on NM_001497.4: 3446-3467
  source 1..23: mol_type = other RNA
cttttaaggcactttggaaaagt

SEQ ID NO: 242 - RNA, 23 nt, synthetic construct
  misc_feature 1..23: note = Description of sequence: Description: B4GALT1 siRNA antisense strands (unmodified); Corresponding positions on NM_001497.4: 1033-1054
  source 1..23: mol_type = other RNA
tgtttacttagagcagagacacc

SEQ ID NO: 243 - RNA, 23 nt, synthetic construct
  misc_feature 1..23: note = Description of sequence: Description: B4GALT1 siRNA antisense strands (unmodified); Corresponding positions on NM_001497.4: 3440-3461
  source 1..23: mol_type = other RNA
aggcactttggaaaagtcaggat

SEQ ID NO: 244 - RNA, 23 nt, synthetic construct
  misc_feature 1..23: note = Description of sequence: Description: B4GALT1 siRNA antisense strands (unmodified); Corresponding positions on NM_001497.4: 1023-1044
  source 1..23: mol_type = other RNA
gagcagagacacctccaaaatac

SEQ ID NO: 245 - RNA, 23 nt, synthetic construct
  misc_feature 1..23: note = Description of sequence: Description: B4GALT1 siRNA antisense strands (unmodified); Corresponding positions on NM_001497.4: 1277-1298
  source 1..23: mol_type = other RNA
gtaggtgagtgagttcaaaccat

SEQ ID NO: 246 - RNA, 23 nt, synthetic construct
  misc_feature 1..23: note = Description of sequence: Description: B4GALT1 siRNA antisense strands (unmodified); Corresponding positions on NM_001497.4: 1025-1046
  source 1..23: mol_type = other RNA
tagagcagagacacctccaaaat

SEQ ID NO: 247 - RNA, 23 nt, synthetic construct
  misc_feature 1..23: note = Description of sequence: Description: B4GALT1 siRNA antisense strands (unmodified); Corresponding positions on NM_001497.4: 1035-1056
  source 1..23: mol_type = other RNA
gttgtttacttagagcagagaca

SEQ ID NO: 248 - RNA, 23 nt, synthetic construct
  misc_feature 1..23: note = Description of sequence: Description: B4GALT1 siRNA antisense strands (unmodified); Corresponding positions on NM_001497.4: 970-991
  source 1..23: mol_type = other RNA
tccattgcaacggaaatgtgccg

SEQ ID NO: 249 - RNA, 23 nt, synthetic construct
  misc_feature 1..23: note = Description of sequence: Description: B4GALT1 siRNA antisense strands (unmodified); Corresponding positions on NM_001497.4: 2823-2844
  source 1..23: mol_type = other RNA
ctaattaaaaggcacattcatgc

SEQ ID NO: 250 - RNA, 23 nt, synthetic construct
  misc_feature 1..23: note = Description of sequence: Description: B4GALT1 siRNA antisense strands (unmodified); Corresponding positions on NM_001497.4: 968-989
  source 1..23: mol_type = other RNA
cattgcaacggaaatgtgccgtg

SEQ ID NO: 251 - RNA, 23 nt, synthetic construct
  misc_feature 1..23: note = Description of sequence: Description: B4GALT1 siRNA antisense strands (unmodified); Corresponding positions on NM_001497.4: 1330-1351
  source 1..23: mol_type = other RNA
atgtccactgtgatttgggtata

SEQ ID NO: 252 - RNA, 23 nt, synthetic construct
  misc_feature 1..23: note = Description of sequence: Description: B4GALT1 siRNA antisense strands (unmodified); Corresponding positions on NM_001497.4: 1339-1360
  source 1..23: mol_type = other RNA
ggtgtcccgatgtccactgtgat

SEQ ID NO: 253 - RNA, 23 nt, synthetic construct
  misc_feature 1..23: note = Description of sequence: Description: B4GALT1 siRNA antisense strands (unmodified); Corresponding positions on NM_001497.4: 1034-1055
  source 1..23: mol_type = other RNA
ttgtttacttagagcagagacac

SEQ ID NO: 254 - RNA, 23 nt, synthetic construct
  misc_feature 1..23: note = Description of sequence: Description: B4GALT1 siRNA antisense strands (unmodified); Corresponding positions on NM_001497.4: 3437-3458
  source 1..23: mol_type = other RNA
cactttggaaaagtcaggatctg

SEQ ID NO: 255 - RNA, 23 nt, synthetic construct
  misc_feature 1..23: note = Description of sequence: Description: B4GALT1 siRNA antisense strands (unmodified); Corresponding positions on NM_001497.4: 2821-2842
  source 1..23: mol_type = other RNA
aattaaaaggcacattcatgctg

SEQ ID NO: 256 - RNA, 23 nt, synthetic construct
  misc_feature 1..23: note = Description of sequence: Description: B4GALT1 siRNA antisense strands (unmodified); Corresponding positions on NM_001497.4: 1013-1034
  source 1..23: mol_type = other RNA
acctccaaaatactgaacataag

SEQ ID NO: 257 - RNA, 23 nt, synthetic construct
  misc_feature 1..23: note = Description of sequence: Description: B4GALT1 siRNA antisense strands (unmodified); Corresponding positions on NM_001497.4: 1072-1093
  source 1..23: mol_type = other RNA
caataattattaggaaatccatt

SEQ ID NO: 258 - RNA, 23 nt, synthetic construct
  misc_feature 1..23: note = Description of sequence: Description: B4GALT1 siRNA antisense strands (unmodified); Corresponding positions on NM_001497.4: 1029-1050
  source 1..23: mol_type = other RNA
tacttagagcagagacacctcca

SEQ ID NO: 259 - RNA, 23 nt, synthetic construct
  misc_feature 1..23: note = Description of sequence: Description: B4GALT1 siRNA antisense strands (unmodified); Corresponding positions on NM_001497.4: 1301-1322
  source 1..23: mol_type = other RNA
gtatctctgtacatccagcacct

SEQ ID NO: 260 - RNA, 23 nt, synthetic construct
  misc_feature 1..23: note = Description of sequence: Description: B4GALT1 siRNA antisense strands (unmodified); Corresponding positions on NM_001497.4: 1040-1061
  source 1..23: mol_type = other RNA
aaactgttgtttacttagagcag

SEQ ID NO: 261 - RNA, 23 nt, synthetic construct
  misc_feature 1..23: note = Description of sequence: Description: B4GALT1 siRNA antisense strands (unmodified); Corresponding positions on NM_001497.4: 1037-1058
  source 1..23: mol_type = other RNA
ctgttgtttacttagagcagaga

SEQ ID NO: 262 - RNA, 23 nt, synthetic construct
  misc_feature 1..23: note = Description of sequence: Description: B4GALT1 siRNA antisense strands (unmodified); Corresponding positions on NM_001497.4: 1015-1036
  source 1..23: mol_type = other RNA
acacctccaaaatactgaacata

SEQ ID NO: 263 - RNA, 23 nt, synthetic construct
  misc_feature 1..23: note = Description of sequence: Description: B4GALT1 siRNA antisense strands (unmodified); Corresponding positions on NM_001497.4: 1024-1045
  source 1..23: mol_type = other RNA
agagcagagacacctccaaaata

SEQ ID NO: 264 - RNA, 23 nt, synthetic construct
  misc_feature 1..23: note = Description of sequence: Description: B4GALT1 siRNA antisense strands (unmodified); Corresponding positions on NM_001497.4: 1333-1354
  source 1..23: mol_type = other RNA
ccgatgtccactgtgatttgggt

SEQ ID NO: 265 - RNA, 23 nt, synthetic construct
  misc_feature 1..23: note = Description of sequence: Description: B4GALT1 siRNA antisense strands (unmodified); Corresponding positions on NM_001497.4: 1038-1059
  source 1..23: mol_type = other RNA
actgttgtttacttagagcagag

SEQ ID NO: 266 - RNA, 23 nt, synthetic construct
  misc_feature 1..23: note = Description of sequence: Description: B4GALT1 siRNA antisense strands (unmodified); Corresponding positions on NM_001497.4: 1027-1048
  source 1..23: mol_type = other RNA
cttagagcagagacacctccaaa

SEQ ID NO: 267 - RNA, 23 nt, synthetic construct
  misc_feature 1..23: note = Description of sequence: Description: B4GALT1 siRNA antisense strands (unmodified); Corresponding positions on NM_001497.4: 3447-3468
  source 1..23: mol_type = other RNA
tcttttaaggcactttggaaaag

SEQ ID NO: 268 - RNA, 23 nt, synthetic construct
  misc_feature 1..23: note = Description of sequence: Description: B4GALT1 siRNA antisense strands (unmodified); Corresponding positions on NM_001497.4: 1302-1323
  source 1..23: mol_type = other RNA
ggtatctctgtacatccagcacc

SEQ ID NO: 269 - RNA, 23 nt, synthetic construct
  misc_feature 1..23: note = Description of sequence: Description: B4GALT1 siRNA antisense strands (unmodified); Corresponding positions on NM_001497.4: 3439-3460
  source 1..23: mol_type = other RNA
ggcactttggaaaagtcaggatc

SEQ ID NO: 270 - RNA, 23 nt, synthetic construct
  misc_feature 1..23: note = Description of sequence: Description: B4GALT1 siRNA antisense strands (unmodified); Corresponding positions on NM_001497.4: 684-705
  source 1..23: mol_type = other RNA
ccaccttgtgaggagagacgcag

SEQ ID NO: 271 - RNA, 23 nt, synthetic construct
  misc_feature 1..23: note = Description of sequence: Description: B4GALT1 siRNA antisense strands (unmodified); Corresponding positions on NM_001497.4: 1073-1094
  source 1..23: mol_type = other RNA
ccaataattattaggaaatccat

SEQ ID NO: 272 - RNA, 23 nt, synthetic construct
  misc_feature 1..23: note = Description of sequence: Description: B4GALT1 siRNA antisense strands (unmodified); Corresponding positions on NM_001497.4: 969-990
  source 1..23: mol_type = other RNA
ccattgcaacggaaatgtgccgt

SEQ ID NO: 273 - RNA, 23 nt, synthetic construct
  misc_feature 1..23: note = Description of sequence: Description: B4GALT1 siRNA antisense strands (unmodified); Corresponding positions on NM_001497.4: 1328-1349
  source 1..23: mol_type = other RNA
gtccactgtgatttgggtataca

SEQ ID NO: 274 - RNA, 23 nt, synthetic construct
  misc_feature 1..23: note = Description of sequence: Description: B4GALT1 siRNA antisense strands (unmodified); Corresponding positions on NM_001497.4: 1018-1039
  source 1..23: mol_type = other RNA
gagacacctccaaaatactgaac

SEQ ID NO: 275 - RNA, 23 nt, synthetic construct
  misc_feature 1..23: note = Description of sequence: Description: B4GALT1 siRNA antisense strands (unmodified); Corresponding positions on NM_001497.4: 862-883
  source 1..23: mol_type = other RNA
tccttcaaggcttcttgaaagcc

SEQ ID NO: 276 - RNA, 23 nt, synthetic construct
  misc_feature 1..23: note = Description of sequence: Description: B4GALT1 siRNA antisense strands (unmodified); Corresponding positions on NM_001497.4: 1087-1108
  source 1..23: mol_type = other RNA
tctcctccccagccccaataatt

SEQ ID NO: 277 - RNA, 23 nt, synthetic construct
  misc_feature 1..23: note = Description of sequence: Description: B4GALT1 siRNA antisense strands (unmodified); Corresponding positions on NM_001497.4: 1347-1368
  source 1..23: mol_type = other RNA
gctagctcggtgtcccgatgtcc

SEQ ID NO: 278 - RNA, 23 nt, synthetic construct
  misc_feature 1..23: note = Description of sequence: Description: B4GALT1 siRNA antisense strands (unmodified); Corresponding positions on NM_001497.4: 3438-3459
  source 1..23: mol_type = other RNA
gcactttggaaaagtcaggatct

SEQ ID NO: 279 - RNA, 23 nt, synthetic construct
  misc_feature 1..23: note = Description of sequence: Description: B4GALT1 siRNA antisense strands (unmodified); Corresponding positions on NM_001497.4: 1329-1350
  source 1..23: mol_type = other RNA
tgtccactgtgatttgggtatac

SEQ ID NO: 280 - RNA, 23 nt, synthetic construct
  misc_feature 1..23: note = Description of sequence: Description: B4GALT1 siRNA antisense strands (unmodified); Corresponding positions on NM_001497.4: 718-739
  source 1..23: mol_type = other RNA
tgctcctgccggttgcggaatgg

SEQ ID NO: 281 - RNA, 23 nt, synthetic construct
  misc_feature 1..23: note = Description of sequence: Description: B4GALT1 siRNA antisense strands (unmodified); Corresponding positions on NM_001497.4: 1303-1324
  source 1..23: mol_type = other RNA
gggtatctctgtacatccagcac

SEQ ID NO: 282 - RNA, 23 nt, synthetic construct
  misc_feature 1..23: note = Description of sequence: Description: B4GALT1 siRNA antisense strands (unmodified); Corresponding positions on NM_001497.4: 682-703
  source 1..23: mol_type = other RNA
accttgtgaggagagacgcagtc

SEQ ID NO: 283 - RNA, 23 nt, synthetic construct
  misc_feature 1..23: note = Description of sequence: Description: B4GALT1 siRNA antisense strands (unmodified); Corresponding positions on NM_001497.4: 1336-1357
  source 1..23: mol_type = other RNA
gtcccgatgtccactgtgatttg

SEQ ID NO: 284 - RNA, 23 nt, synthetic construct
  misc_feature 1..23: note = Description of sequence: Description: B4GALT1 siRNA antisense strands (unmodified); Corresponding positions on NM_001497.4: 1036-1057
  source 1..23: mol_type = other RNA
tgttgtttacttagagcagagac

SEQ ID NO: 285 - RNA, 23 nt, synthetic construct
  misc_feature 1..23: note = Description of sequence: Description: B4GALT1 siRNA antisense strands (unmodified); Corresponding positions on NM_001497.4: 1016-1037
  source 1..23: mol_type = other RNA
gacacctccaaaatactgaacat

SEQ ID NO: 286 - RNA, 23 nt, synthetic construct
  misc_feature 1..23: note = Description of sequence: Description: B4GALT1 siRNA antisense strands (unmodified); Corresponding positions on NM_001497.4: 1088-1109
  source 1..23: mol_type = other RNA
ttctcctccccagccccaataat

SEQ ID NO: 287 - RNA, 23 nt, synthetic construct
  misc_feature 1..23: note = Description of sequence: Description: B4GALT1 siRNA antisense strands (unmodified); Corresponding positions on NM_001497.4: 1012-1033
  source 1..23: mol_type = other RNA
cctccaaaatactgaacataagg

SEQ ID NO: 288 - RNA, 23 nt, synthetic construct
  misc_feature 1..23: note = Description of sequence: Description: B4GALT1 siRNA antisense strands (unmodified); Corresponding positions on NM_001497.4: 1331-1352
  source 1..23: mol_type = other RNA
gatgtccactgtgatttgggtat

SEQ ID NO: 289 - RNA, 23 nt, synthetic construct
  misc_feature 1..23: note = Description of sequence: Description: B4GALT1 siRNA antisense strands (unmodified); Corresponding positions on NM_001497.4: 1075-1096
  source 1..23: mol_type = other RNA
ccccaataattattaggaaatcc

SEQ ID NO: 290 - RNA, 23 nt, synthetic construct
  misc_feature 1..23: note = Description of sequence: Description: B4GALT1 siRNA antisense strands (unmodified); Corresponding positions on NM_001497.4: 1340-1361
  source 1..23: mol_type = other RNA
cggtgtcccgatgtccactgtga

SEQ ID NO: 291 - RNA, 23 nt, synthetic construct
  misc_feature 1..23: note = Description of sequence: Description: B4GALT1 siRNA antisense strands (unmodified); Corresponding positions on NM_001497.4: 1327-1348
  source 1..23: mol_type = other RNA
tccactgtgatttgggtatacaa

SEQ ID NO: 292 - RNA, 23 nt, synthetic construct
  misc_feature 1..23: note = Description of sequence: Description: B4GALT1 siRNA antisense strands (unmodified); Corresponding positions on NM_001497.4: 1091-1112
  source 1..23: mol_type = other RNA
atcttctcctccccagccccaat

SEQ ID NO: 293 - RNA, 23 nt, synthetic construct
  misc_feature 1..23: note = Description of sequence: Description: B4GALT1 siRNA antisense strands (unmodified); Corresponding positions on NM_001497.4: 1014-1035
  source 1..23: mol_type = other RNA
cacctccaaaatactgaacataa

SEQ ID NO: 294 - RNA, 23 nt, synthetic construct
  misc_feature 1..23: note = Description of sequence: Description: B4GALT1 siRNA antisense strands (unmodified); Corresponding positions on NM_001497.4: 1346-1367
  source 1..23: mol_type = other RNA
ctagctcggtgtcccgatgtcca

SEQ ID NO: 295 - RNA, 23 nt, synthetic construct
  misc_feature 1..23: note = Description of sequence: Description: B4GALT1 siRNA antisense strands (unmodified); Corresponding positions on NM_001497.4: 1342-1363
  source 1..23: mol_type = other RNA
ctcggtgtcccgatgtccactgt

SEQ ID NO: 296 - RNA, 23 nt, synthetic construct
  misc_feature 1..23: note = Description of sequence: Description: B4GALT1 siRNA antisense strands (unmodified); Corresponding positions on NM_001497.4: 1086-1107
  source 1..23: mol_type = other RNA
ctcctccccagccccaataatta

SEQ ID NO: 297 - RNA, 23 nt, synthetic construct
  misc_feature 1..23: note = Description of sequence: Description: B4GALT1 siRNA antisense strands (unmodified); Corresponding positions on NM_001497.4: 1092-1113
  source 1..23: mol_type = other RNA
catcttctcctccccagccccaa

SEQ ID NO: 298 - RNA, 23 nt, synthetic construct
  misc_feature 1..23: note = Description of sequence: Description: B4GALT1 siRNA antisense strands (unmodified); Corresponding positions on NM_001497.4: 681-702
  source 1..23: mol_type = other RNA
ccttgtgaggagagacgcagtcc

SEQ ID NO: 299 - RNA, 23 nt, synthetic construct
  misc_feature 1..23: note = Description of sequence: Description: B4GALT1 siRNA antisense strands (unmodified); Corresponding positions on NM_001497.4: 1082-1103
  source 1..23: mol_type = other RNA
tccccagccccaataattattag

SEQ ID NO: 300 - RNA, 23 nt, synthetic construct
  misc_feature 1..23: note = Description of sequence: Description: B4GALT1 siRNA antisense strands (unmodified); Corresponding positions on NM_001497.4: 1338-1359
  source 1..23: mol_type = other RNA
gtgtcccgatgtccactgtgatt

SEQ ID NO: 301 - RNA, 23 nt, synthetic construct
  misc_feature 1..23: note = Description of sequence: Description: B4GALT1 siRNA antisense strands (unmodified); Corresponding positions on NM_001497.4: 683-704
  source 1..23: mol_type = other RNA
caccttgtgaggagagacgcagt

SEQ ID NO: 302 - RNA, 21 nt, synthetic construct
  misc_feature 1..21: note = Description of sequence: Description: B4GALT1 siRNA sense strands (unmodified); Corresponding positions on NM_001497.4:
  source 1..21: mol_type = other RNA
aaacttgaatttcctatgtat

SEQ ID NO: 303 - RNA, 21 nt, synthetic construct
  misc_feature 1..21: note = Description of sequence: Description: B4GALT1 siRNA sense strands (unmodified); Corresponding positions on NM_001497.4:
  source 1..21: mol_type = other RNA
tatgtaaacttgaatttccta

SEQ ID NO: 304 - RNA, 21 nt, synthetic construct
  misc_feature 1..21: note = Description of sequence: Description: B4GALT1 siRNA sense strands (unmodified); Corresponding positions on NM_001497.4:
  source 1..21: mol_type = other RNA
tgtaaacttgaatttcctatg

SEQ ID NO: 305 - RNA, 21 nt, synthetic construct
  misc_feature 1..21: note = Description of sequence: Description: B4GALT1 siRNA sense strands (unmodified); Corresponding positions on NM_001497.4:
  source 1..21: mol_type = other RNA
cttgaatttcctatgtatttt

SEQ ID NO: 306 - RNA, 21 nt, synthetic construct
  misc_feature 1..21: note = Description of sequence: Description: B4GALT1 siRNA sense strands (unmodified); Corresponding positions on NM_001497.4:
  source 1..21: mol_type = other RNA
acttgaatttcctatgtattt

SEQ ID NO: 307 - RNA, 21 nt, synthetic construct
  misc_feature 1..21: note = Description of sequence: Description: B4GALT1 siRNA sense strands (unmodified); Corresponding positions on NM_001497.4:
  source 1..21: mol_type = other RNA
atgtaaacttgaatttcctat

SEQ ID NO: 308 - RNA, 21 nt, synthetic construct
  misc_feature 1..21: note = Description of sequence: Description: B4GALT1 siRNA sense strands (unmodified); Corresponding positions on NM_001497.4:
  source 1..21: mol_type = other RNA
atgctatgtaaacttgaattt

SEQ ID NO: 309 - RNA, 21 nt, synthetic construct
  misc_feature 1..21: note = Description of sequence: Description: B4GALT1 siRNA sense strands (unmodified); Corresponding positions on NM_001497.4:
  source 1..21: mol_type = other RNA
tctgatttctgaatgtaaagt

SEQ ID NO: 310 - RNA, 21 nt, synthetic construct
  misc_feature 1..21: note = Description of sequence: Description: B4GALT1 siRNA sense strands (unmodified); Corresponding positions on NM_001497.4:
  source 1..21: mol_type = other RNA
taaacttgaatttcctatgta

SEQ ID NO: 311 - RNA, 21 nt, synthetic construct
  misc_feature 1..21: note = Description of sequence: Description: B4GALT1 siRNA sense strands (unmodified); Corresponding positions on NM_001497.4:
  source 1..21: mol_type = other RNA
aatggatttcctaataattat

SEQ ID NO: 312 - RNA, 21 nt, synthetic construct
  misc_feature 1..21: note = Description of sequence: Description: B4GALT1 siRNA sense strands (unmodified); Corresponding positions on NM_001497.4:
  source 1..21: mol_type = other RNA
atggatttcctaataattatt

SEQ ID NO: 313 - RNA, 21 nt, synthetic construct
  misc_feature 1..21: note = Description of sequence: Description: B4GALT1 siRNA sense strands (unmodified); Corresponding positions on NM_001497.4:
  source 1..21: mol_type = other RNA
catgctatgtaaacttgaatt

SEQ ID NO: 314 - RNA, 21 nt, synthetic construct
  misc_feature 1..21: note = Description of sequence: Description: B4GALT1 siRNA sense strands (unmodified); Corresponding positions on NM_001497.4:
  source 1..21: mol_type = other RNA
ttggaggtgtctctgctctaa

SEQ ID NO: 315 - RNA, 21 nt, synthetic construct
  misc_feature 1..21: note = Description of sequence: Description: B4GALT1 siRNA sense strands (unmodified); Corresponding positions on NM_001497.4:
  source 1..21: mol_type = other RNA
tcctcagaggtttgaccgaat

SEQ ID NO: 316 - RNA, 21 nt, synthetic construct
  misc_feature 1..21: note = Description of sequence: Description: B4GALT1 siRNA sense strands (unmodified); Corresponding positions on NM_001497.4:
  source 1..21: mol_type = other RNA
caatggatttcctaataatta

SEQ ID NO: 317 - RNA, 21 nt, synthetic construct
  misc_feature 1..21: note = Description of sequence: Description: B4GALT1 siRNA sense strands (unmodified); Corresponding positions on NM_001497.4:
  source 1..21: mol_type = other RNA
cttttccaaagtgccttaaaa

SEQ ID NO: 318 - RNA, 21 nt, synthetic construct
  misc_feature 1..21: note = Description of sequence: Description: B4GALT1 siRNA sense strands (unmodified); Corresponding positions on NM_001497.4:
  source 1..21: mol_type = other RNA
tgctatgtaaacttgaatttc

SEQ ID NO: 319 - RNA, 21 nt, synthetic construct
  misc_feature 1..21: note = Description of sequence: Description: B4GALT1 siRNA sense strands (unmodified); Corresponding positions on NM_001497.4:
  source 1..21: mol_type = other RNA
atcaatggatttcctaataat

SEQ ID NO: 320 - RNA, 21 nt, synthetic construct
  misc_feature 1..21: note = Description of sequence: Description: B4GALT1 siRNA sense strands (unmodified); Corresponding positions on NM_001497.4:
  source 1..21: mol_type = other RNA
aacttgaatttcctatgtatt

SEQ ID NO: 321 - RNA, 21 nt, synthetic construct
  misc_feature 1..21: note = Description of sequence: Description: B4GALT1 siRNA sense strands (unmodified); Corresponding positions on NM_001497.4:
  source 1..21: mol_type = other RNA
tgctctaagtaaacaacagtt

SEQ ID NO: 322 - RNA, 21 nt, synthetic construct
  misc_feature 1..21: note = Description of sequence: Description: B4GALT1 siRNA sense strands (unmodified); Corresponding positions on NM_001497.4:
  source 1..21: mol_type = other RNA
gctatgtaaacttgaatttcc

SEQ ID NO: 323 - RNA, 21 nt, synthetic construct
  misc_feature 1..21: note = Description of sequence: Description: B4GALT1 siRNA sense strands (unmodified); Corresponding positions on NM_001497.4:
  source 1..21: mol_type = other RNA
ggtgtctctgctctaagtaaa

SEQ ID NO: 324 - RNA, 21 nt, synthetic construct
  misc_feature 1..21: note = Description of sequence: Description: B4GALT1 siRNA sense strands (unmodified); Corresponding positions on NM_001497.4:
  source 1..21: mol_type = other RNA
catgaatgtgccttttaatta

SEQ ID NO: 325 - RNA, 21 nt, synthetic construct
  misc_feature 1..21: note = Description of sequence: Description: B4GALT1 siRNA sense strands (unmodified); Corresponding positions on NM_001497.4:
  source 1..21: mol_type = other RNA
aggtgtctctgctctaagtaa

SEQ ID NO: 326 - RNA, 21 nt, synthetic construct
  misc_feature 1..21: note = Description of sequence: Description: B4GALT1 siRNA sense strands (unmodified); Corresponding positions on NM_001497.4:
  source 1..21: mol_type = other RNA
tccaaagtgccttaaaagaaa

SEQ ID NO: 327 - RNA, 21 nt, synthetic construct
  misc_feature 1..21: note = Description of sequence: Description: B4GALT1 siRNA sense strands (unmodified); Corresponding positions on NM_001497.4:
  source 1..21: mol_type = other RNA
ctatgtaaacttgaatttcct

SEQ ID NO: 328 - RNA, 21 nt, synthetic construct
  misc_feature 1..21: note = Description of sequence: Description: B4GALT1 siRNA sense strands (unmodified); Corresponding positions on NM_001497.4:
  source 1..21: mol_type = other RNA
cagtattttggaggtgtctct

SEQ ID NO: 329 - RNA, 21 nt, synthetic construct
  misc_feature 1..21: note = Description of sequence: Description: B4GALT1 siRNA sense strands (unmodified); Corresponding positions on NM_001497.4:
  source 1..21: mol_type = other RNA
agcatgaatgtgccttttaat

SEQ ID NO: 330 - RNA, 21 nt, synthetic construct
  misc_feature 1..21: note = Description of sequence: Description: B4GALT1 siRNA sense strands (unmodified); Corresponding positions on NM_001497.4:
  source 1..21: mol_type = other RNA
gtgtctctgctctaagtaaac

SEQ ID NO: 331 - RNA, 21 nt, synthetic construct
  misc_feature 1..21: note = Description of sequence: Description: B4GALT1 siRNA sense strands (unmodified); Corresponding positions on NM_001497.4:
  source 1..21: mol_type = other RNA
aggagaagatgatgacatttt

SEQ ID NO: 332 - RNA, 21 nt, synthetic construct
  misc_feature 1..21: note = Description of sequence: Description: B4GALT1 siRNA sense strands (unmodified); Corresponding positions on NM_001497.4:
  source 1..21: mol_type = other RNA
ggaggtgtctctgctctaagt

SEQ ID NO: 333 - RNA, 21 nt, synthetic construct
  misc_feature 1..21: note = Description of sequence: Description: B4GALT1 siRNA sense strands (unmodified); Corresponding positions on NM_001497.4:
  source 1..21: mol_type = other RNA
gtctgatttctgaatgtaaag

SEQ ID NO: 334 - RNA, 21 nt, synthetic construct
  misc_feature 1..21: note = Description of sequence: Description: B4GALT1 siRNA sense strands (unmodified); Corresponding positions on NM_001497.4:
  source 1..21: mol_type = other RNA
acggcacatttccgttgcaat

SEQ ID NO: 335 - RNA, 21 nt, synthetic construct
  misc_feature 1..21: note = Description of sequence: Description: B4GALT1 siRNA sense strands (unmodified); Corresponding positions on NM_001497.4:
  source 1..21: mol_type = other RNA
gatttcctaataattattggg

SEQ ID NO: 336 - RNA, 21 nt, synthetic construct
  misc_feature 1..21: note = Description of sequence: Description: B4GALT1 siRNA sense strands (unmodified); Corresponding positions on NM_001497.4:
  source 1..21: mol_type = other RNA
ttcagtattttggaggtgtct

SEQ ID NO: 337 - RNA, 21 nt, synthetic construct
  misc_feature 1..21: note = Description of sequence: Description: B4GALT1 siRNA sense strands (unmodified); Corresponding positions on NM_001497.4:
  source 1..21: mol_type = other RNA
tcaatggatttcctaataatt

SEQ ID NO: 338 - RNA, 21 nt, synthetic construct
  misc_feature 1..21: note = Description of sequence: Description: B4GALT1 siRNA sense strands (unmodified); Corresponding positions on NM_001497.4:
  source 1..21: mol_type = other RNA
atcctcagaggtttgaccgaa

SEQ ID NO: 339 - RNA, 21 nt, synthetic construct
  misc_feature 1..21: note = Description of sequence: Description: B4GALT1 siRNA sense strands (unmodified); Corresponding positions on NM_001497.4:
  source 1..21: mol_type = other RNA
tggtttgaactcactcaccta

SEQ ID NO: 340 - RNA, 21 nt, synthetic construct
  misc_feature 1..21: note = Description of sequence: Description: B4GALT1 siRNA sense strands (unmodified); Corresponding positions on NM_001497.4:
  source 1..21: mol_type = other RNA
ttccaaagtgccttaaaagaa

SEQ ID NO: 341 - RNA, 21 nt, synthetic construct
  misc_feature 1..21: note = Description of sequence: Description: B4GALT1 siRNA sense strands (unmodified); Corresponding positions on NM_001497.4:
  source 1..21: mol_type = other RNA
ttttccaaagtgccttaaaag

SEQ ID NO: 342 - RNA, 21 nt, synthetic construct
  misc_feature 1..21: note = Description of sequence: Description: B4GALT1 siRNA sense strands (unmodified); Corresponding positions on NM_001497.4:
  source 1..21: mol_type = other RNA
tgtctctgctctaagtaaaca

SEQ ID NO: 343 - RNA, 21 nt, synthetic construct
  misc_feature 1..21: note = Description of sequence: Description: B4GALT1 siRNA sense strands (unmodified); Corresponding positions on NM_001497.4:
  source 1..21: mol_type = other RNA
cctgacttttccaaagtgcct

SEQ ID NO: 344 - RNA, 21 nt, synthetic construct
  misc_feature 1..21: note = Description of sequence: Description: B4GALT1 siRNA sense strands (unmodified); Corresponding positions on NM_001497.4:
  source 1..21: mol_type = other RNA
attttggaggtgtctctgctc

SEQ ID NO: 345 - RNA, 21 nt, synthetic construct
  misc_feature 1..21: note = Description of sequence: Description: B4GALT1 siRNA sense strands (unmodified); Corresponding positions on NM_001497.4:
  source 1..21: mol_type = other RNA
ggtttgaactcactcacctac

SEQ ID NO: 346 - RNA, 21 nt, synthetic construct
  misc_feature 1..21: note = Description of sequence: Description: B4GALT1 siRNA sense strands (unmodified); Corresponding positions on NM_001497.4:
  source 1..21: mol_type = other RNA
tttggaggtgtctctgctcta

SEQ ID NO: 347 - RNA, 21 nt, synthetic construct
  misc_feature 1..21: note = Description of sequence: Description: B4GALT1 siRNA sense strands (unmodified); Corresponding positions on NM_001497.4:
  source 1..21: mol_type = other RNA
tctctgctctaagtaaacaac

SEQ ID NO: 348 - RNA, 21 nt, synthetic construct
  misc_feature 1..21: note = Description of sequence: Description: B4GALT1 siRNA sense strands (unmodified); Corresponding positions on NM_001497.4:
  source 1..21: mol_type = other RNA
gcacatttccgttgcaatgga

SEQ ID NO: 349 - RNA, 21 nt, synthetic construct
  misc_feature 1..21: note = Description of sequence: Description: B4GALT1 siRNA sense strands (unmodified); Corresponding positions on NM_001497.4:
  source 1..21: mol_type = other RNA
atgaatgtgccttttaattag

SEQ ID NO: 350 - RNA, 21 nt, synthetic construct
  misc_feature 1..21: note = Description of sequence: Description: B4GALT1 siRNA sense strands (unmodified); Corresponding positions on NM_001497.4:
  source 1..21: mol_type = other RNA
cggcacatttccgttgcaatg

SEQ ID NO: 351 - RNA, 21 nt, synthetic construct
  misc_feature 1..21: note = Description of sequence: Description: B4GALT1 siRNA sense strands (unmodified); Corresponding positions on NM_001497.4:
  source 1..21: mol_type = other RNA
tacccaaatcacagtggacat

SEQ ID NO: 352 - RNA, 21 nt, synthetic construct
  misc_feature 1..21: note = Description of sequence: Description: B4GALT1 siRNA sense strands (unmodified); Corresponding positions on NM_001497.4:
  source 1..21: mol_type = other RNA
cacagtggacatcgggacacc

SEQ ID NO: 353 - RNA, 21 nt, synthetic construct
  misc_feature 1..21: note = Description of sequence: Description: B4GALT1 siRNA sense strands (unmodified); Corresponding positions on NM_001497.4:
  source 1..21: mol_type = other RNA
gtctctgctctaagtaaacaa

SEQ ID NO: 354 - RNA, 21 nt, synthetic construct
  misc_feature 1..21: note = Description of sequence: Description: B4GALT1 siRNA sense strands (unmodified); Corresponding positions on NM_001497.4:
  source 1..21: mol_type = other RNA
gatcctgacttttccaaagtg

SEQ ID NO: 355 - RNA, 21 nt, synthetic construct
  misc_feature 1..21: note = Description of sequence: Description: B4GALT1 siRNA sense strands (unmodified); Corresponding positions on NM_001497.4:
  source 1..21: mol_type = other RNA
gcatgaatgtgccttttaatt

SEQ ID NO: 356 - RNA, 21 nt, synthetic construct
  misc_feature 1..21: note = Description of sequence: Description: B4GALT1 siRNA sense strands (unmodified); Corresponding positions on NM_001497.4:
  source 1..21: mol_type = other RNA
tatgttcagtattttggaggt

SEQ ID NO: 357 - RNA, 21 nt, synthetic construct
  misc_feature 1..21: note = Description of sequence: Description: B4GALT1 siRNA sense strands (unmodified); Corresponding positions on NM_001497.4:
  source 1..21: mol_type = other RNA
tggatttcctaataattattg

SEQ ID NO: 358 - RNA, 21 nt, synthetic construct
  misc_feature 1..21: note = Description of sequence: Description: B4GALT1 siRNA sense strands (unmodified); Corresponding positions on NM_001497.4:
  source 1..21: mol_type = other RNA
gaggtgtctctgctctaagta

SEQ ID NO: 359 - RNA, 21 nt, synthetic construct
  misc_feature 1..21: note = Description of sequence: Description: B4GALT1 siRNA sense strands (unmodified); Corresponding positions on NM_001497.4:
  source 1..21: mol_type = other RNA
gtgctggatgtacagagatac

SEQ ID NO: 360 - RNA, 21 nt, synthetic construct
  misc_feature 1..21: note = Description of sequence: Description: B4GALT1 siRNA sense strands (unmodified); Corresponding positions on NM_001497.4:
  source 1..21: mol_type = other RNA
gctctaagtaaacaacagttt

SEQ ID NO: 361 - RNA, 21 nt, synthetic construct
  misc_feature 1..21: note = Description of sequence: Description: B4GALT1 siRNA sense strands (unmodified); Corresponding positions on NM_001497.4:
  source 1..21: mol_type = other RNA
tctgctctaagtaaacaacag

SEQ ID NO: 362 - RNA, 21 nt, synthetic construct
  misc_feature 1..21: note = Description of sequence: Description: B4GALT1 siRNA sense strands (unmodified); Corresponding positions on NM_001497.4:
  source 1..21: mol_type = other RNA
tgttcagtattttggaggtgt

SEQ ID NO: 363 - RNA, 21 nt, synthetic construct
  misc_feature 1..21: note = Description of sequence: Description: B4GALT1 siRNA sense strands (unmodified); Corresponding positions on NM_001497.4:
  source 1..21: mol_type = other RNA
ttttggaggtgtctctgctct

SEQ ID NO: 364 - RNA, 21 nt, synthetic construct
  misc_feature 1..21: note = Description of sequence: Description: B4GALT1 siRNA sense strands (unmodified); Corresponding positions on NM_001497.4:
  source 1..21: mol_type = other RNA
ccaaatcacagtggacatcgg

SEQ ID NO: 365 - RNA, 21 nt, synthetic construct
  misc_feature 1..21: note = Description of sequence: Description: B4GALT1 siRNA sense strands (unmodified); Corresponding positions on NM_001497.4:
  source 1..21: mol_type = other RNA
ctgctctaagtaaacaacagt

SEQ ID NO: 366 - RNA, 21 nt, synthetic construct
  misc_feature 1..21: note = Description of sequence: Description: B4GALT1 siRNA sense strands (unmodified); Corresponding positions on NM_001497.4:
  source 1..21: mol_type = other RNA
tggaggtgtctctgctctaag

SEQ ID NO: 367 - RNA, 21 nt, synthetic construct
  misc_feature 1..21: note = Description of sequence: Description: B4GALT1 siRNA sense strands (unmodified); Corresponding positions on NM_001497.4:
  source 1..21: mol_type = other RNA
tttccaaagtgccttaaaaga

SEQ ID NO: 368 - RNA, 21 nt, synthetic construct
  misc_feature 1..21: note = Description of sequence: Description: B4GALT1 siRNA sense strands (unmodified); Corresponding positions on NM_001497.4:
  source 1..21: mol_type = other RNA
tgctggatgtacagagatacc

SEQ ID NO: 369 - RNA, 21 nt, synthetic construct
  misc_feature 1..21: note = Description of sequence: Description: B4GALT1 siRNA sense strands (unmodified); Corresponding positions on NM_001497.4:
  source 1..21: mol_type = other RNA
tcctgacttttccaaagtgcc

SEQ ID NO: 370 - RNA, 21 nt, synthetic construct
  misc_feature 1..21: note = Description of sequence: Description: B4GALT1 siRNA sense strands (unmodified); Corresponding positions on NM_001497.4:
  source 1..21: mol_type = other RNA
gcgtctctcctcacaaggtgg

SEQ ID NO: 371 - RNA, 21 nt, synthetic construct
  misc_feature 1..21: note = Description of sequence: Description: B4GALT1 siRNA sense strands (unmodified); Corresponding positions on NM_001497.4:
  source 1..21: mol_type = other RNA
ggatttcctaataattattgg

SEQ ID NO: 372 - RNA, 21 nt, synthetic construct
  misc_feature 1..21: note = Description of sequence: Description: B4GALT1 siRNA sense strands (unmodified); Corresponding positions on NM_001497.4:
  source 1..21: mol_type = other RNA
ggcacatttccgttgcaatgg

SEQ ID NO: 373 - RNA, 21 nt, synthetic construct
  misc_feature 1..21: note = Description of sequence: Description: B4GALT1 siRNA sense strands (unmodified); Corresponding positions on NM_001497.4:
  source 1..21: mol_type = other RNA
tatacccaaatcacagtggac

SEQ ID NO: 374 - RNA, 21 nt, synthetic construct
  misc_feature 1..21: note = Description of sequence: Description: B4GALT1 siRNA sense strands (unmodified); Corresponding positions on NM_001497.4:
  source 1..21: mol_type = other RNA
tcagtattttggaggtgtctc

SEQ ID NO: 375 - RNA, 21 nt, synthetic construct
  misc_feature 1..21: note = Description of sequence: Description: B4GALT1 siRNA sense strands (unmodified); Corresponding positions on NM_001497.4:
  source 1..21: mol_type = other RNA
ctttcaagaagccttgaagga

SEQ ID NO: 376 - RNA, 21 nt, synthetic construct
  misc_feature 1..21: note = Description of sequence: Description: B4GALT1 siRNA sense strands (unmodified); Corresponding positions on NM_001497.4:
  source 1..21: mol_type = other RNA
ttattggggctggggaggaga

SEQ ID NO: 377 - RNA, 21 nt, synthetic construct
  misc_feature 1..21: note = Description of sequence: Description: B4GALT1 siRNA sense strands (unmodified); Corresponding positions on NM_001497.4:
  source 1..21: mol_type = other RNA
acatcgggacaccgagctagc

SEQ ID NO: 378 - RNA, 21 nt, synthetic construct
  misc_feature 1..21: note = Description of sequence: Description: B4GALT1 siRNA sense strands (unmodified); Corresponding positions on NM_001497.4:
  source 1..21: mol_type = other RNA
atcctgacttttccaaagtgc

SEQ ID NO: 379 - RNA, 21 nt, synthetic construct
  misc_feature 1..21: note = Description of sequence: Description: B4GALT1 siRNA sense strands (unmodified); Corresponding positions on NM_001497.4:
  source 1..21: mol_type = other RNA
atacccaaatcacagtggaca

SEQ ID NO: 380 - RNA, 21 nt, synthetic construct
  misc_feature 1..21: note = Description of sequence: Description: B4GALT1 siRNA sense strands (unmodified); Corresponding positions on NM_001497.4:
  source 1..21: mol_type = other RNA
attccgcaaccggcaggagca

SEQ ID NO: 381 - RNA, 21 nt, synthetic construct
  misc_feature 1..21: note = Description of sequence: Description: B4GALT1 siRNA sense strands (unmodified); Corresponding positions on NM_001497.4:
  source 1..21: mol_type = other RNA
gctggatgtacagagataccc

SEQ ID NO: 382 - RNA, 21 nt, synthetic construct
  misc_feature 1..21: note = Description of sequence: Description: B4GALT1 siRNA sense strands (unmodified); Corresponding positions on NM_001497.4:
  source 1..21: mol_type = other RNA
ctgcgtctctcctcacaaggt

SEQ ID NO: 383 - RNA, 21 nt, synthetic construct
  misc_feature 1..21: note = Description of sequence: Description: B4GALT1 siRNA sense strands (unmodified); Corresponding positions on NM_001497.4:
  source 1..21: mol_type = other RNA
aatcacagtggacatcgggac

SEQ ID NO: 384 - RNA, 21 nt, synthetic construct
  misc_feature 1..21: note = Description of sequence: Description: B4GALT1 siRNA sense strands (unmodified); Corresponding positions on NM_001497.4:
  source 1..21: mol_type = other RNA
ctctgctctaagtaaacaaca

SEQ ID NO: 385 - RNA, 21 nt, synthetic construct
  misc_feature 1..21: note = Description of sequence: Description: B4GALT1 siRNA sense strands (unmodified); Corresponding positions on NM_001497.4:
  source 1..21: mol_type = other RNA
gttcagtattttggaggtgtc

SEQ ID NO: 386 - RNA, 21 nt, synthetic construct
  misc_feature 1..21: note = Description of sequence: Description: B4GALT1 siRNA sense strands (unmodified); Corresponding positions on NM_001497.4:
  source 1..21: mol_type = other RNA
tattggggctggggaggagaa

SEQ ID NO: 387 - RNA, 21 nt, synthetic construct
  misc_feature 1..21: note = Description of sequence: Description: B4GALT1 siRNA sense strands (unmodified); Corresponding positions on NM_001497.4:
  source 1..21: mol_type = other RNA
ttatgttcagtattttggagg

SEQ ID NO: 388 - RNA, 21 nt, synthetic construct
  misc_feature 1..21: note = Description of sequence: Description: B4GALT1 siRNA sense strands (unmodified); Corresponding positions on NM_001497.4:
  source 1..21: mol_type = other RNA
acccaaatcacagtggacatc

SEQ ID NO: 389 - RNA, 21 nt, synthetic construct
  misc_feature 1..21: note = Description of sequence: Description: B4GALT1 siRNA sense strands (unmodified); Corresponding positions on NM_001497.4:
  source 1..21: mol_type = other RNA
atttcctaataattattgggg

SEQ ID NO: 390 - RNA, 21 nt, synthetic construct
  misc_feature 1..21: note = Description of sequence: Description: B4GALT1 siRNA sense strands (unmodified); Corresponding positions on NM_001497.4:
  source 1..21: mol_type = other RNA
acagtggacatcgggacaccg

SEQ ID NO: 391 - RNA, 21 nt, synthetic construct
  misc_feature 1..21: note = Description of sequence: Description: B4GALT1 siRNA sense strands (unmodified); Corresponding positions on NM_001497.4:
  source 1..21: mol_type = other RNA
gtatacccaaatcacagtgga

SEQ ID NO: 392 - RNA, 21 nt, synthetic construct
  misc_feature 1..21: note = Description of sequence: Description: B4GALT1 siRNA sense strands (unmodified); Corresponding positions on NM_001497.4:
  source 1..21: mol_type = other RNA
tggggctggggaggagaagat

SEQ ID NO: 393 - RNA, 21 nt, synthetic construct
  misc_feature 1..21: note = Description of sequence: Description: B4GALT1 siRNA sense strands (unmodified); Corresponding positions on NM_001497.4:
  source 1..21: mol_type = other RNA
atgttcagtattttggaggtg

SEQ ID NO: 394 - RNA, 21 nt, synthetic construct
  misc_feature 1..21: note = Description of sequence: Description: B4GALT1 siRNA sense strands (unmodified); Corresponding positions on NM_001497.4:
  source 1..21: mol_type = other RNA
gacatcgggacaccgagctag

SEQ ID NO: 395 - RNA, 21 nt, synthetic construct
  misc_feature 1..21: note = Description of sequence: Description: B4GALT1 siRNA sense strands (unmodified); Corresponding positions on NM_001497.4:
  source 1..21: mol_type = other RNA
agtggacatcgggacaccgag

SEQ ID NO: 396 - RNA, 21 nt, synthetic construct
  misc_feature 1..21: note = Description of sequence: Description: B4GALT1 siRNA sense strands (unmodified); Corresponding positions on NM_001497.4:
  source 1..21: mol_type = other RNA
attattggggctggggaggag

SEQ ID NO: 397 - RNA, 21 nt, synthetic construct
  misc_feature 1..21: note = Description of sequence: Description: B4GALT1 siRNA sense strands (unmodified); Corresponding positions on NM_001497.4:
  source 1..21: mol_type = other RNA
ggggctggggaggagaagatg

SEQ ID NO: 398 - RNA, 21 nt, synthetic construct
  misc_feature 1..21: note = Description of sequence: Description: B4GALT1 siRNA sense strands (unmodified); Corresponding positions on NM_001497.4:
  source 1..21: mol_type = other RNA
actgcgtctctcctcacaagg

SEQ ID NO: 399 - RNA, 21 nt, synthetic construct
  misc_feature 1..21: note = Description of sequence: Description: B4GALT1 siRNA sense strands (unmodified); Corresponding positions on NM_001497.4:
  source 1..21: mol_type = other RNA
aataattattggggctgggga

SEQ ID NO: 400 - RNA, 21 nt, synthetic construct
  misc_feature 1..21: note = Description of sequence: Description: B4GALT1 siRNA sense strands (unmodified); Corresponding positions on NM_001497.4:
  source 1..21: mol_type = other RNA
tcacagtggacatcgggacac

SEQ ID NO: 401 - RNA, 21 nt, synthetic construct
  misc_feature 1..21: note = Description of sequence: Description: B4GALT1 siRNA sense strands (unmodified); Corresponding positions on NM_001497.4:
  source 1..21: mol_type = other RNA
tgcgtctctcctcacaaggtg

SEQ ID NO: 402 - RNA, 23 nt, synthetic construct
  source 1..23: mol_type = other RNA
  misc_feature 1..23: note = Description: B4GALT1 siRNA antisense strands (modified); Antisense strand ID: modified_base; Underlying base sequence: 2
  modified_base 1: mod_base = OTHER; note = 2'O-methyl-adenosine
  modified_base 2: mod_base = OTHER; note = 2'Fluoro-adenosine
  modified_base 3: mod_base = um
  modified_base 4: mod_base = OTHER; note = 2'O-methyl-adenosine
  modified_base 5: mod_base = cm
  modified_base 6: mod_base = OTHER; note = 2'Fluoro-adenosine
  modified_base 7: mod_base = um
  modified_base 8: mod_base = OTHER; note = 2'Fluoro-adenosine
  modified_base 9: mod_base = OTHER; note = 2' Fluoro-guanosine
  modified_base 10: mod_base = gm
  modified_base 11: mod_base = OTHER; note = 2'O-methyl-adenosine
  modified_base 12: mod_base = OTHER; note = 2'O-methyl-adenosine
  modified_base 13: mod_base = OTHER; note = 2'O-methyl-adenosine
  modified_base 14: mod_base = OTHER; note = 2' Fluoro-guanosine
  modified_base 15: mod_base = um
  modified_base 16: mod_base = OTHER; note = 2' Fluoro-cytidine
  modified_base 17: mod_base = OTHER; note = 2'O-methyl-adenosine
  modified_base 18: mod_base = OTHER; note = 2'O-methyl-adenosine
  modified_base 19: mod_base = gm
  modified_base 20: mod_base = um
  modified_base 21: mod_base = um
  modified_base 22: mod_base = um
  modified_base 23: mod_base = OTHER; note = 2'O-methyl-adenosine
  misc_feature 1^2: note = phosphorothioate linkage
  misc_feature 2^3: note = phosphorothioate linkage
  misc_feature 21^22: note = phosphorothioate linkage
  misc_feature 22^23: note = phosphorothioate linkage
aatacataggaaattcaagttta

SEQ ID NO: 403 - RNA, 23 nt, synthetic construct
  source 1..23: mol_type = other RNA
  misc_feature 1..23: note = Description: B4GALT1 siRNA antisense strands (modified); Antisense strand ID: modified_base; Underlying base sequence: 2
  modified_base 1: mod_base = OTHER; note = 2'O-methyl-adenosine
  modified_base 2: mod_base = OTHER; note = 2'Fluoro-adenosine
  modified_base 3: mod_base = um
  modified_base 4: mod_base = um
  modified_base 5: mod_base = OTHER; note = 2'O-methyl-adenosine
  modified_base 6: mod_base = OTHER; note = 2' Fluoro-guanosine
  modified_base 7: mod_base = um
  modified_base 8: mod_base = OTHER; note = 2'Fluoro-adenosine
  modified_base 9: mod_base = OTHER; note = 2' Fluoro-guanosine
  modified_base 10: mod_base = gm
  modified_base 11: mod_base = OTHER; note = 2'O-methyl-adenosine
  modified_base 12: mod_base = OTHER; note = 2'O-methyl-adenosine
  modified_base 13: mod_base = OTHER; note = 2'O-methyl-adenosine
  modified_base 14: mod_base = OTHER; note = 2' Fluoro-guanosine
  modified_base 15: mod_base = cm
  modified_base 16: mod_base = OTHER; note = 2' Fluoro-cytidine
  modified_base 17: mod_base = OTHER; note = 2'O-methyl-adenosine
  modified_base 18: mod_base = um
  modified_base 19: mod_base = um
  modified_base 20: mod_base = gm
  modified_base 21: mod_base = OTHER; note = 2'O-methyl-adenosine
  modified_base 22: mod_base = um
  modified_base 23: mod_base = gm
  misc_feature 1^2: note = phosphorothioate linkage
  misc_feature 2^3: note = phosphorothioate linkage
  misc_feature 21^22: note = phosphorothioate linkage
  misc_feature 22^23: note = phosphorothioate linkage
aattattaggaaatccattgatg

SEQ ID NO: 404 - RNA, 23 nt, synthetic construct
  source 1..23: mol_type = other RNA
  misc_feature 1..23: note = Description: B4GALT1 siRNA antisense strands (modified); Antisense strand ID: modified_base; Underlying base sequence: 2
  modified_base 1: mod_base = gm
  modified_base 2: mod_base = OTHER; note = 2'Fluoro-adenosine
  modified_base 3: mod_base = cm
  modified_base 4: mod_base = OTHER; note = 2'O-methyl-adenosine
  modified_base 5: mod_base = cm
  modified_base 6: mod_base = OTHER; note = 2' Fluoro-cytidine
  modified_base 7: mod_base = um
  modified_base 8: mod_base = OTHER; note = 2' Fluoro-cytidine
  modified_base 9: mod_base = OTHER; note = 2' Fluoro-cytidine
  modified_base 10: mod_base = OTHER; note = 2'O-methyl-adenosine
  modified_base 11: mod_base = OTHER; note = 2'O-methyl-adenosine
  modified_base 12: mod_base = OTHER; note = 2'O-methyl-adenosine
  modified_base 13: mod_base = OTHER; note = 2'O-methyl-adenosine
  modified_base 14: mod_base = OTHER; note = 2' Fluoro-guanosine
  modified_base 15: mod_base = OTHER; note = 2'O-methyl-adenosine
  modified_base 16: mod_base = OTHER; note = 2' Fluoro-cytidine
  modified_base 17: mod_base = um
  modified_base 18: mod_base = gm
  modified_base 19: mod_base = OTHER; note = 2'O-methyl-adenosine
  modified_base 20: mod_base = OTHER; note = 2'O-methyl-adenosine
  modified_base 21: mod_base = cm
  modified_base 22: mod_base = OTHER; note = 2'O-methyl-adenosine
  modified_base 23: mod_base = um
  misc_feature 1^2: note = phosphorothioate linkage
  misc_feature 2^3: note = phosphorothioate linkage
  misc_feature 21^22: note = phosphorothioate linkage
  misc_feature 22^23: note = phosphorothioate linkage
gacacctccaaaatactgaacat

SEQ ID NO: 405 - RNA, 23 nt, synthetic construct
  source 1..23: mol_type = other RNA
  misc_feature 1..23: note = Description: B4GALT1 siRNA antisense strands (modified); Antisense strand ID: modified_base; Underlying base sequence: 2
  modified_base 1: mod_base = OTHER; note = 2'O-methyl-adenosine
  modified_base 2: mod_base = OTHER; note = 2' Fluoro-guanosine
  modified_base 3: mod_base = OTHER; note = 2'O-methyl-adenosine
  modified_base 4: mod_base = OTHER; note = 2'O-methyl-adenosine
  modified_base 5: mod_base = um
  modified_base 6: mod_base = OTHER; note = 2' Fluoro-guanosine
  modified_base 7: mod_base = OTHER; note = 2'O-methyl-adenosine
  modified_base 8: mod_base = OTHER; note = 2' Fluoro-guanosine
  modified_base 9: mod_base = OTHER; note = 2' Fluoro-guanosine
  modified_base 10: mod_base = OTHER; note = 2'O-methyl-adenosine
  modified_base 11: mod_base = gm
  modified_base 12: mod_base = gm
  modified_base 13: mod_base = OTHER; note = 2'O-methyl-adenosine
  modified_base 14: mod_base = OTHER; note = 2'Fluoro-adenosine
  modified_base 15: mod_base = OTHER; note = 2'O-methyl-adenosine
  modified_base 16: mod_base = OTHER; note = 2' Fluoro-guanosine
  modified_base 17: mod_base = cm
  modified_base 18: mod_base = cm
  modified_base 19: mod_base = OTHER; note = 2'O-methyl-adenosine
  modified_base 20: mod_base = um
  modified_base 21: mod_base = um
  modified_base 22: mod_base = gm
  modified_base 23: mod_base = OTHER; note = 2'O-methyl-adenosine
  misc_feature 1^2: note = phosphorothioate linkage
  misc_feature 2^3: note = phosphorothioate linkage
  misc_feature 21^22: note = phosphorothioate linkage
  misc_feature 22^23: note = phosphorothioate linkage
ataattattaggaaatccattga

SEQ ID NO: 406 - RNA, 23 nt, synthetic construct
  source 1..23: mol_type = other RNA
  misc_feature 1..23: note = Description: B4GALT1 siRNA antisense strands (modified); Antisense strand ID: modified_base; Underlying base sequence: 2
  modified_base 1: mod_base = OTHER; note = 2'O-methyl-adenosine
  modified_base 2: mod_base = OTHER; note = 2'Fluoro-adenosine
  modified_base 3: mod_base = OTHER; note = 2'O-methyl-adenosine
  modified_base 4: mod_base = OTHER; note = 2'O-methyl-adenosine
  modified_base 5: mod_base = um
  modified_base 6: mod_base = OTHER; note = 2'Fluoro-adenosine
  modified_base 7: mod_base = cm
  modified_base 8: mod_base = OTHER; note = 2'Fluoro-adenosine
  modified_base 9: mod_base = OTHER; note = 2' Fluoro-guanosine
  modified_base 10: mod_base = OTHER; note = 2'O-methyl-adenosine
  modified_base 11: mod_base = gm
  modified_base 12: mod_base = gm
  modified_base 13: mod_base = OTHER; note = 2'O-methyl-adenosine
  modified_base 14: mod_base = OTHER; note = 2'Fluoro-adenosine
  modified_base 15: mod_base = OTHER; note = 2'O-methyl-adenosine
  modified_base 16: mod_base = OTHER; note = 2' Fluoro-guanosine
  modified_base 17: mod_base = um
  modified_base 18: mod_base = cm
  modified_base 19: mod_base = OTHER; note = 2'O-methyl-adenosine
  modified_base 20: mod_base = OTHER; note = 2'O-methyl-adenosine
  modified_base 21: mod_base = gm
  modified_base 22: mod_base = um
  modified_base 23: mod_base = um
  misc_feature 1^2: note = phosphorothioate linkage
  misc_feature 2^3: note = phosphorothioate linkage
  misc_feature 21^22: note = phosphorothioate linkage
  misc_feature 22^23: note = phosphorothioate linkage
aaaatacataggaaattcaagtt

SEQ ID NO: 407 - RNA, 23 nt, synthetic construct
  source 1..23: mol_type = other RNA
  misc_feature 1..23: note = Description: B4GALT1 siRNA antisense strands (modified); Antisense strand ID: modified_base; Underlying base sequence: 2
  modified_base 1: mod_base = gm
  modified_base 2: mod_base = OTHER; note = 2' Fluoro-guanosine
  modified_base 3: mod_base = OTHER; note = 2'O-methyl-adenosine
  modified_base 4: mod_base = um
  modified_base 5: mod_base = cm
  modified_base 6: mod_base = OTHER; note = 2' Fluoro-guanosine
  modified_base 7: mod_base = cm
  modified_base 8: mod_base = OTHER; note = 2' Fluoro-guanosine
  modified_base 9: mod_base = OTHER; note = 2' Fluoro-guanosine
  modified_base 10: mod_base = um
  modified_base 11: mod_base = OTHER; note = 2'O-methyl-adenosine
  modified_base 12: mod_base = cm
  modified_base 13: mod_base = OTHER; note = 2'O-methyl-adenosine
  modified_base 14: mod_base = OTHER; note = 2' Fluoro-guanosine
  modified_base 15: mod_base = cm
  modified_base 16: mod_base = OTHER; note = 2' Fluoro-cytidine
  modified_base 17: mod_base = OTHER; note = 2'O-methyl-adenosine
  modified_base 18: mod_base = gm
  modified_base 19: mod_base = cm
  modified_base 20: mod_base = OTHER; note = 2'O-methyl-adenosine
  modified_base 21: mod_base = cm
  modified_base 22: mod_base = cm
  modified_base 23: mod_base = um
  misc_feature 1^2: note = phosphorothioate linkage
  misc_feature 2^3: note = phosphorothioate linkage
  misc_feature 21^22: note = phosphorothioate linkage
  misc_feature 22^23: note = phosphorothioate linkage
gtatctctgtacatccagcacct

SEQ ID NO: 408 - RNA, 23 nt, synthetic construct
  source 1..23: mol_type = other RNA
  misc_feature 1..23: note = Description: B4GALT1 siRNA antisense strands (modified); Antisense strand ID: modified_base; Underlying base sequence: 2
  modified_base 1: mod_base = um
  modified_base 2: mod_base = OTHER; note = 2' Fluoro-guanosine
  modified_base 3: mod_base = cm
  modified_base 4: mod_base = um
  modified_base 5: mod_base = um
  modified_base 6: mod_base = OTHER; note = 2' Fluoro-guanosine
  modified_base 7: mod_base = um
  modified_base 8: mod_base = OTHER; note = 2'Fluoro-adenosine
  modified_base 9: mod_base = OTHER; note = 2'Fluoro-adenosine
  modified_base 10: mod_base = gm
  modified_base 11: mod_base = gm
  modified_base 12: mod_base = cm
  modified_base 13: mod_base = OTHER; note = 2'O-methyl-adenosine
  modified_base 14: mod_base = OTHER; note = 2' Fluoro-cytidine
  modified_base 15: mod_base = um
  modified_base 16: mod_base = OTHER; note = 2' Fluoro-guanosine
  modified_base 17: mod_base = um
  modified_base 18: mod_base = gm
  modified_base 19: mod_base = gm
  modified_base 20: mod_base = OTHER; note = 2'O-methyl-adenosine
  modified_base 21: mod_base = OTHER; note = 2'O-methyl-adenosine
  modified_base 22: mod_base = OTHER; note = 2'O-methyl-adenosine
  modified_base 23: mod_base = OTHER; note = 2'O-methyl-adenosine
  misc_feature 1^2: note = phosphorothioate linkage
  misc_feature 2^3: note = phosphorothioate linkage
  misc_feature 21^22: note = phosphorothioate linkage
  misc_feature 22^23: note = phosphorothioate linkage
ttcttttaaggcactttggaaaa

SEQ ID NO: 409 - RNA, 23 nt, synthetic construct
  source 1..23: mol_type = other RNA
  misc_feature 1..23: note = Description: B4GALT1 siRNA antisense strands (modified); Antisense strand ID: modified_base; Underlying base sequence: 2
  modified_base 1: mod_base = gm
  modified_base 2: mod_base = OTHER; note = 2' Fluoro-guanosine
  modified_base 3: mod_base = OTHER; note = 2'O-methyl-adenosine
  modified_base 4: mod_base = OTHER; note = 2'O-methyl-adenosine
  modified_base 5: mod_base = OTHER; note = 2'O-methyl-adenosine
  modified_base 6: mod_base = OTHER; note = 2' Fluoro-guanosine
  modified_base 7: mod_base = um
  modified_base 8: mod_base = OTHER; note = 2' Fluoro-cytidine
  modified_base 9: mod_base = OTHER; note = 2'Fluoro-adenosine
  modified_base 10: mod_base = OTHER; note = 2'O-methyl-adenosine
  modified_base 11: mod_base = gm
  modified_base 12: mod_base = um
  modified_base 13: mod_base = um
  modified_base 14: mod_base = OTHER; note = 2' Fluoro-guanosine
  modified_base 15: mod_base = OTHER; note = 2'O-methyl-adenosine
  modified_base 16: mod_base = OTHER; note = 2' Fluoro-cytidine
  modified_base 17: mod_base = OTHER; note = 2'O-methyl-adenosine
  modified_base 18: mod_base = um
  modified_base 19: mod_base = OTHER; note = 2'O-methyl-adenosine
  modified_base 20: mod_base = gm
  modified_base 21: mod_base = cm
  modified_base 22: mod_base = OTHER; note = 2'O-methyl-adenosine
  modified_base 23: mod_base = um
  misc_feature 1^2: note = phosphorothioate linkage
  misc_feature 2^3: note = phosphorothioate linkage
  misc_feature 21^22: note = phosphorothioate linkage
  misc_feature 22^23: note = phosphorothioate linkage
ggaaattcaagtttacatagcat

SEQ ID NO: 410 - RNA, 23 nt, synthetic construct
  source 1..23: mol_type = other RNA
  misc_feature 1..23: note = Description: B4GALT1 siRNA antisense strands (modified); Antisense strand ID: modified_base; Underlying base sequence: 2
  modified_base 1: mod_base = OTHER; note = 2'O-methyl-adenosine
  modified_base 2: mod_base = OTHER; note = 2' Fluoro-guanosine
  modified_base 3: mod_base = um
  modified_base 4: mod_base = gm
  modified_base 5: mod_base = cm
  modified_base 6: mod_base = OTHER; note = 2'Fluoro-adenosine
  modified_base 7: mod_base = OTHER; note = 2'O-methyl-adenosine
  modified_base 8: mod_base = OTHER; note = 2' Fluoro-cytidine
  modified_base 9: mod_base = OTHER; note = 2' Fluoro-guanosine
  modified_base 10: mod_base = gm
  modified_base 11: mod_base = OTHER; note = 2'O-methyl-adenosine
  modified_base 12: mod_base = OTHER; note = 2'O-methyl-adenosine
  modified_base 13: mod_base = OTHER; note = 2'O-methyl-adenosine
  modified_base 14: mod_base = OTHER; note = 2' Fluoro-guanosine
  modified_base 15: mod_base = gm
  modified_base 16: mod_base = OTHER; note = 2' Fluoro-guanosine
  modified_base 17: mod_base = gm
  modified_base 18: mod_base = cm
  modified_base 19: mod_base = cm
  modified_base 20: mod_base = gm
  modified_base 21: mod_base = um
  modified_base 22: mod_base = gm
  modified_base 23: mod_base = gm
  misc_feature 1^2: note = phosphorothioate linkage
  misc_feature 2^3: note = phosphorothioate linkage
  misc_feature 21^22: note = phosphorothioate linkage
  misc_feature 22^23: note = phosphorothioate linkage
attgcaacggaaatgtgccgtgg

SEQ ID NO: 411 - RNA, 23 nt, synthetic construct
  source 1..23: mol_type = other RNA
  misc_feature 1..23: note = Description: B4GALT1 siRNA antisense strands (modified); Antisense strand ID: modified_base; Underlying base sequence: 2
  modified_base 1: mod_base = OTHER; note = 2'O-methyl-adenosine
  modified_base 2: mod_base = OTHER; note = 2' Fluoro-guanosine
  modified_base 3: mod_base = gm
  modified_base 4: mod_base = OTHER; note = 2'O-methyl-adenosine
  modified_base 5: mod_base = OTHER; note = 2'O-methyl-adenosine
  modified_base 6: mod_base = OTHER; note = 2'Fluoro-adenosine
  modified_base 7: mod_base = um
  modified_base 8: mod_base = OTHER; note = 2' Fluoro-guanosine
  modified_base 9: mod_base = OTHER; note = 2' Fluoro-cytidine
  modified_base 10: mod_base = OTHER; note = 2'O-methyl-adenosine
  modified_base 11: mod_base = OTHER; note = 2'O-methyl-adenosine
  modified_base 12: mod_base = gm
  modified_base 13: mod_base = um
  modified_base 14: mod_base = OTHER; note = 2' Fluoro-guanosine
  modified_base 15: mod_base = um
  modified_base 16: mod_base = OTHER; note = 2'Fluoro-adenosine
  modified_base 17: mod_base = cm
  modified_base 18: mod_base = OTHER; note = 2'O-methyl-adenosine
  modified_base 19: mod_base = um
  modified_base 20: mod_base = OTHER; note = 2'O-methyl-adenosine
  modified_base 21: mod_base = gm
  modified_base 22: mod_base = cm
  modified_base 23: mod_base = OTHER; note = 2'O-methyl-adenosine
  misc_feature 1^2: note = phosphorothioate linkage
  misc_feature 2^3: note = phosphorothioate linkage
  misc_feature 21^22: note = phosphorothioate linkage
  misc_feature 22^23: note = phosphorothioate linkage
aggaaattcaagtttacatagca

SEQ ID NO: 412 - RNA, 23 nt, synthetic construct
  source 1..23: mol_type = other RNA
  misc_feature 1..23: note = Description: B4GALT1 siRNA antisense strands (modified); Antisense strand ID: modified_base; Underlying base sequence: 2
  modified_base 1: mod_base = um
  modified_base 2: mod_base = OTHER; note = 2'Fluoro-adenosine
  modified_base 3: mod_base = OTHER; note = 2'O-methyl-adenosine
  modified_base 4: mod_base = um
  modified_base 5: mod_base = um
  modified_base 6: mod_base = OTHER; note = 2'Fluoro-adenosine
  modified_base 7: mod_base = um
  modified_base 8: mod_base = OTHER; note = 2' Fluoro-guanosine
  modified_base 9: mod_base = OTHER; note = 2'Fluoro-adenosine
  modified_base 10: mod_base = gm
  modified_base 11: mod_base = gm
  modified_base 12: mod_base = OTHER; note = 2'O-methyl-adenosine
  modified_base 13: mod_base = OTHER; note = 2'O-methyl-adenosine
  modified_base 14: mod_base = OTHER; note = 2'Fluoro-adenosine
  modified_base 15: mod_base = um
  modified_base 16: mod_base = OTHER; note = 2' Fluoro-cytidine
  modified_base 17: mod_base = cm
  modified_base 18: mod_base = OTHER; note = 2'O-methyl-adenosine
  modified_base 19: mod_base = um
  modified_base 20: mod_base = um
  modified_base 21: mod_base = gm
  modified_base 22: mod_base = OTHER; note = 2'O-methyl-adenosine
  modified_base 23: mod_base = um
  misc_feature 1^2: note = phosphorothioate linkage
  misc_feature 2^3: note = phosphorothioate linkage
  misc_feature 21^22: note = phosphorothioate linkage
  misc_feature 22^23: note = phosphorothioate linkage
taattattaggaaatccattgat

SEQ ID NO: 413 - RNA, 23 nt, synthetic construct
  source 1..23: mol_type = other RNA
  misc_feature 1..23: note = Description: B4GALT1 siRNA antisense strands (modified); Antisense strand ID: modified_base; Underlying base sequence: 2
  modified_base 1: mod_base = um
  modified_base 2: mod_base = OTHER; note = 2' Fluoro-guanosine
  modified_base 3: mod_base = um
  modified_base 4: mod_base = OTHER; note = 2'O-methyl-adenosine
  modified_base 5: mod_base = cm
  modified_base 6: mod_base = OTHER; note = 2' Fluoro-guanosine
  modified_base 7: mod_base = um
  modified_base 8: mod_base = OTHER; note = 2'Fluoro-adenosine
  modified_base 9: mod_base = OTHER; note = 2' Fluoro-guanosine
  modified_base 10: mod_base = OTHER; note = 2'O-methyl-adenosine
  modified_base 11: mod_base = gm
  modified_base 12: mod_base = cm
  modified_base 13: mod_base = OTHER; note = 2'O-methyl-adenosine
  modified_base 14: mod_base = OTHER; note = 2' Fluoro-guanosine
  modified_base 15: mod_base = OTHER; note = 2'O-methyl-adenosine
  modified_base 16: mod_base = OTHER; note = 2' Fluoro-guanosine
  modified_base 17: mod_base = OTHER; note = 2'O-methyl-adenosine
  modified_base 18: mod_base = cm
  modified_base 19: mod_base = OTHER; note = 2'O-methyl-adenosine
  modified_base 20: mod_base = cm
  modified_base 21: mod_base = cm
  modified_base 22: mod_base = um
  modified_base 23: mod_base = cm
  misc_feature 1^2: note = phosphorothioate linkage
  misc_feature 2^3: note = phosphorothioate linkage
  misc_feature 21^22: note = phosphorothioate linkage
  misc_feature 22^23: note = phosphorothioate linkage
tttacttagagcagagacacctc

SEQ ID NO: 414 - RNA, 23 nt, synthetic construct
  source 1..23: mol_type = other RNA
  misc_feature 1..23: note = Description: B4GALT1 siRNA antisense strands (modified); Antisense strand ID: modified_base; Underlying base sequence: 2
  modified_base 1: mod_base = um
  modified_base 2: mod_base = OTHER; note = 2' Fluoro-guanosine
  modified_base 3: mod_base = um
  modified_base 4: mod_base = cm
  modified_base 5: mod_base = um
  modified_base 6: mod_base = OTHER; note = 2' Fluoro-guanosine
  modified_base 7: mod_base = um
  modified_base 8: mod_base = OTHER; note = 2' Fluoro-guanosine
  modified_base 9: mod_base = OTHER; note = 2'Fluoro-adenosine
  modified_base 10: mod_base = OTHER; note = 2'O-methyl-adenosine
  modified_base 11: mod_base = gm
  modified_base 12: mod_base = gm
  modified_base 13: mod_base = cm
  modified_base 14: mod_base = OTHER; note = 2'Fluoro-adenosine
  modified_base 15: mod_base = cm
  modified_base 16: mod_base = OTHER; note = 2' Fluoro-guanosine
  modified_base 17: mod_base = um
  modified_base 18: mod_base = um
  modified_base 19: mod_base = gm
  modified_base 20: mod_base = gm
  modified_base 21: mod_base = OTHER; note = 2'O-methyl-adenosine
  modified_base 22: mod_base = OTHER; note = 2'O-methyl-adenosine
  modified_base 23: mod_base = OTHER; note = 2'O-methyl-adenosine
  misc_feature 1^2: note = phosphorothioate linkage
  misc_feature 2^3: note = phosphorothioate linkage
  misc_feature 21^22: note = phosphorothioate linkage
  misc_feature 22^23: note = phosphorothioate linkage
tttcttttaaggcactttggaaa

SEQ ID NO: 415 - RNA, 23 nt, synthetic construct
  source 1..23: mol_type = other RNA
  misc_feature 1..23: note = Description: B4GALT1 siRNA antisense strands (modified); Antisense strand ID: modified_base; Underlying base sequence: 2
  modified_base 1: mod_base = um
  modified_base 2: mod_base = OTHER; note = 2'Fluoro-adenosine
  modified_base 3: mod_base = OTHER; note = 2'O-methyl-adenosine
  modified_base 4: mod_base = um
  modified_base 5: mod_base = um
  modified_base 6: mod_base = OTHER; note = 2'Fluoro-adenosine
  modified_base 7: mod_base = OTHER; note = 2'O-methyl-adenosine
  modified_base 8: mod_base = OTHER; note = 2'Fluoro-adenosine
  modified_base 9: mod_base = OTHER; note = 2'Fluoro-adenosine
  modified_base 10: mod_base = gm
  modified_base 11: mod_base = gm
  modified_base 12: mod_base = cm
  modified_base 13: mod_base = OTHER; note = 2'O-methyl-adenosine
  modified_base 14: mod_base = OTHER; note = 2' Fluoro-cytidine
  modified_base 15: mod_base = OTHER; note = 2'O-methyl-adenosine
  modified_base 16: mod_base = OTHER; note = 2' Fluoro-guanosine
  modified_base 17: mod_base = um
  modified_base 18: mod_base = cm
  modified_base 19: mod_base = OTHER; note = 2'O-methyl-adenosine
  modified_base 20: mod_base = um
  modified_base 21: mod_base = gm
  modified_base 22: mod_base = cm
  modified_base 23: mod_base = um
  misc_feature 1^2: note = phosphorothioate linkage
  misc_feature 2^3: note = phosphorothioate linkage
  misc_feature 21^22: note = phosphorothioate linkage
  misc_feature 22^23: note = phosphorothioate linkage
taattaaaaggcacattcatgct

SEQ ID NO: 416 - RNA, 23 nt, synthetic construct
  source 1..23: mol_type = other RNA
  misc_feature 1..23: note = Description: B4GALT1 siRNA antisense strands (modified); Antisense strand ID: modified_base; Underlying base sequence: 2
  modified_base 1: mod_base = OTHER; note = 2'O-methyl-adenosine
  modified_base 2: mod_base = OTHER; note = 2' Fluoro-guanosine
  modified_base 3: mod_base = OTHER; note = 2'O-methyl-adenosine
  modified_base 4: mod_base = cm
  modified_base 5: mod_base = OTHER; note = 2'O-methyl-adenosine
  modified_base 6: mod_base = OTHER; note = 2' Fluoro-guanosine
  modified_base 7: mod_base = OTHER; note = 2'O-methyl-adenosine
  modified_base 8: mod_base = OTHER; note = 2' Fluoro-guanosine
  modified_base 9: mod_base = OTHER; note = 2' Fluoro-guanosine
  modified_base 10: mod_base = OTHER; note = 2'O-methyl-adenosine
  modified_base 11: mod_base = OTHER; note = 2'O-methyl-adenosine
  modified_base 12: mod_base = OTHER; note = 2'O-methyl-adenosine
  modified_base 13: mod_base = um
  modified_base 14: mod_base = OTHER; note = 2' Fluoro-guanosine
  modified_base 15: mod_base = cm
  modified_base 16: mod_base = OTHER; note = 2'Fluoro-adenosine
  modified_base 17: mod_base = OTHER; note = 2'O-methyl-adenosine
  modified_base 18: mod_base = gm
  modified_base 19: mod_base = um
  modified_base 20: mod_base = um
  modified_base 21: mod_base = um
  modified_base 22: mod_base = OTHER; note = 2'O-methyl-adenosine
  modified_base 23: mod_base = cm
  misc_feature 1^2: note = phosphorothioate linkage
  misc_feature 2^3: note = phosphorothioate linkage
  misc_feature 21^22: note = phosphorothioate linkage
  misc_feature 22^23: note = phosphorothioate linkage
atacataggaaattcaagtttac

SEQ ID NO: 417 - RNA, 23 nt, synthetic construct
  source 1..23: mol_type = other RNA
  misc_feature 1..23: note = Description: B4GALT1 siRNA antisense strands (modified); Antisense strand ID: modified_base; Underlying base sequence: 2
  modified_base 1: mod_base = gm
  modified_base 2: mod_base = OTHER; note = 2' Fluoro-guanosine
  modified_base 3: mod_base = cm
  modified_base 4: mod_base = OTHER; note = 2'O-methyl-adenosine
  modified_base 5: mod_base = cm
  modified_base 6: mod_base = OTHER; note = 2' Fluoro-guanosine
  modified_base 7: mod_base = um
  modified_base 8: mod_base = OTHER; note = 2' Fluoro-guanosine
  modified_base 9: mod_base = OTHER; note = 2' Fluoro-guanosine
  modified_base 10: mod_base = gm
  modified_base 11: mod_base = OTHER; note = 2'O-methyl-adenosine
  modified_base 12: mod_base = OTHER; note = 2'O-methyl-adenosine
  modified_base 13: mod_base = OTHER; note = 2'O-methyl-adenosine
  modified_base 14: mod_base = OTHER; note = 2'Fluoro-adenosine
  modified_base 15: mod_base = gm
  modified_base 16: mod_base = OTHER; note = 2' Fluoro-guanosine
  modified_base 17: mod_base = cm
  modified_base 18: mod_base = OTHER; note = 2'O-methyl-adenosine
  modified_base 19: mod_base = gm
  modified_base 20: mod_base = gm
  modified_base 21: mod_base = OTHER; note = 2'O-methyl-adenosine
  modified_base 22: mod_base = um
  modified_base 23: mod_base = cm
  misc_feature 1^2: note = phosphorothioate linkage
  misc_feature 2^3: note = phosphorothioate linkage
  misc_feature 21^22: note = phosphorothioate linkage
  misc_feature 22^23: note = phosphorothioate linkage
ggcactttggaaaagtcaggatc

SEQ ID NO: 418 - RNA, 23 nt, synthetic construct
  source 1..23: mol_type = other RNA
  misc_feature 1..23: note = Description: B4GALT1 siRNA antisense strands (modified); Antisense strand ID: modified_base; Underlying base sequence: 2
  modified_base 1: mod_base = OTHER; note = 2'O-methyl-adenosine
  modified_base 2: mod_base = OTHER; note = 2' Fluoro-guanosine
  modified_base 3: mod_base = um
  modified_base 4: mod_base = OTHER; note = 2'O-methyl-adenosine
  modified_base 5: mod_base = um
  modified_base 6: mod_base = OTHER; note = 2' Fluoro-guanosine
  modified_base 7: mod_base = OTHER; note = 2'O-methyl-adenosine
  modified_base 8: mod_base = OTHER; note = 2' Fluoro-guanosine
  modified_base 9: mod_base = OTHER; note = 2' Fluoro-guanosine
  modified_base 10: mod_base = OTHER; note = 2'O-methyl-adenosine
  modified_base 11: mod_base = OTHER; note = 2'O-methyl-adenosine
  modified_base 12: mod_base = OTHER; note = 2'O-methyl-adenosine
  modified_base 13: mod_base = um
  modified_base 14: mod_base = OTHER; note = 2' Fluoro-cytidine
  modified_base 15: mod_base = cm
  modified_base 16: mod_base = OTHER; note = 2'Fluoro-adenosine
  modified_base 17: mod_base = um
  modified_base 18: mod_base = um
  modified_base 19: mod_base = gm
  modified_base 20: mod_base = OTHER; note = 2'O-methyl-adenosine
  modified_base 21: mod_base = um
  modified_base 22: mod_base = gm
  modified_base 23: mod_base = gm
  misc_feature 1^2: note = phosphorothioate linkage
  misc_feature 2^3: note = phosphorothioate linkage
  misc_feature 21^22: note = phosphorothioate linkage
  misc_feature 22^23: note = phosphorothioate linkage
attattaggaaatccattgatgg

SEQ ID NO: 419 - RNA, 23 nt, synthetic construct
  source 1..23: mol_type = other RNA
  misc_feature 1..23: note = Description: B4GALT1 siRNA antisense strands (modified); Antisense strand ID: modified_base; Underlying base sequence: 2
  modified_base 1: mod_base = OTHER; note = 2'O-methyl-adenosine
  modified_base 2: mod_base = OTHER; note = 2' Fluoro-cytidine
  modified_base 3: mod_base = OTHER; note = 2'O-methyl-adenosine
  modified_base 4: mod_base = cm
  modified_base 5: mod_base = cm
  modified_base 6: mod_base = OTHER; note = 2' Fluoro-guanosine
  modified_base 7: mod_base = cm
  modified_base 8: mod_base = OTHER; note = 2' Fluoro-cytidine
  modified_base 9: mod_base = OTHER; note = 2'Fluoro-adenosine
  modified_base 10: mod_base = OTHER; note = 2'O-methyl-adenosine
  modified_base 11: mod_base = OTHER; note = 2'O-methyl-adenosine
  modified_base 12: mod_base = OTHER; note = 2'O-methyl-adenosine
  modified_base 13: mod_base = um
  modified_base 14: mod_base = OTHER; note = 2'Fluoro-adenosine
  modified_base 15: mod_base = cm
  modified_base 16: mod_base = OTHER; note = 2' Fluoro-guanosine
  modified_base 17: mod_base = gm
  modified_base 18: mod_base = OTHER; note = 2'O-methyl-adenosine
  modified_base 19: mod_base = OTHER; note = 2'O-methyl-adenosine
  modified_base 20: mod_base = cm
  modified_base 21: mod_base = OTHER; note = 2'O-methyl-adenosine
  modified_base 22: mod_base = um
  modified_base 23: mod_base = OTHER; note = 2'O-methyl-adenosine
  misc_feature 1^2: note = phosphorothioate linkage
  misc_feature 2^3: note = phosphorothioate linkage
  misc_feature 21^22: note = phosphorothioate linkage
  misc_feature 22^23: note = phosphorothioate linkage
acacctccaaaatactgaacata

SEQ ID NO: 420 - RNA, 23 nt, synthetic construct
  source 1..23: mol_type = other RNA
  misc_feature 1..23: note = Description: B4GALT1 siRNA antisense strands (modified); Antisense strand ID: modified_base; Underlying base sequence: 2
  modified_base 1: mod_base = gm
  modified_base 2: mod_base = OTHER; note = 2' Fluoro-cytidine
  modified_base 3: mod_base = OTHER; note = 2'O-methyl-adenosine
  modified_base 4: mod_base = cm
  modified_base 5: mod_base = um
  modified_base 6: mod_base = OTHER; note = 2' Fluoro-guanosine
  modified_base 7: mod_base = um
  modified_base 8: mod_base = OTHER; note = 2' Fluoro-guanosine
  modified_base 9: mod_base = OTHER; note = 2' Fluoro-guanosine
  modified_base 10: mod_base = OTHER; note = 2'O-methyl-adenosine
  modified_base 11: mod_base = OTHER; note = 2'O-methyl-adenosine
  modified_base 12: mod_base = OTHER; note = 2'O-methyl-adenosine
  modified_base 13: mod_base = OTHER; note = 2'O-methyl-adenosine
  modified_base 14: mod_base = OTHER; note = 2' Fluoro-guanosine
  modified_base 15: mod_base = um
  modified_base 16: mod_base = OTHER; note = 2' Fluoro-cytidine
  modified_base 17: mod_base = OTHER; note = 2'O-methyl-adenosine
  modified_base 18: mod_base = gm
  modified_base 19: mod_base = gm
  modified_base 20: mod_base = OTHER; note = 2'O-methyl-adenosine
  modified_base 21: mod_base = um
  modified_base 22: mod_base = cm
  modified_base 23: mod_base = um
  misc_feature 1^2: note = phosphorothioate linkage
  misc_feature 2^3: note = phosphorothioate linkage
  misc_feature 21^22: note = phosphorothioate linkage
  misc_feature 22^23: note = phosphorothioate linkage
gcactttggaaaagtcaggatct

SEQ ID NO: 421 - RNA, 23 nt, synthetic construct
  source 1..23: mol_type = other RNA
  misc_feature 1..23: note = Description: B4GALT1 siRNA antisense strands (modified); Antisense strand ID: modified_base; Underlying base sequence: 2
  modified_base 1: mod_base = OTHER; note = 2'O-methyl-adenosine
  modified_base 2: mod_base = OTHER; note = 2'Fluoro-adenosine
  modified_base 3: mod_base = um
  modified_base 4: mod_base = OTHER; note = 2'O-methyl-adenosine
  modified_base 5: mod_base = OTHER; note = 2'O-methyl-adenosine
  modified_base 6: mod_base = OTHER; note = 2' Fluoro-guanosine
  modified_base 7: mod_base = um
  modified_base 8: mod_base = OTHER; note = 2'Fluoro-adenosine
  modified_base 9: mod_base = OTHER; note = 2' Fluoro-guanosine
  modified_base 10: mod_base = um
  modified_base 11: mod_base = OTHER; note = 2'O-methyl-adenosine
  modified_base 12: mod_base = gm
  modified_base 13: mod_base = gm
  modified_base 14: mod_base = OTHER; note = 2'Fluoro-adenosine
  modified_base 15: mod_base = OTHER; note = 2'O-methyl-adenosine
  modified_base 16: mod_base = OTHER; note = 2'Fluoro-adenosine
  modified_base 17: mod_base = um
  modified_base 18: mod_base = cm
  modified_base 19: mod_base = cm
  modified_base 20: mod_base = OTHER; note = 2'O-methyl-adenosine
  modified_base 21: mod_base = um
  modified_base 22: mod_base = um
  modified_base 23: mod_base = gm
  misc_feature 1^2: note = phosphorothioate linkage
  misc_feature 2^3: note = phosphorothioate linkage
  misc_feature 21^22: note = phosphorothioate linkage
  misc_feature 22^23: note = phosphorothioate linkage
aataattattaggaaatccattg

SEQ ID NO: 422 - RNA, 23 nt, synthetic construct
  source 1..23: mol_type = other RNA
  misc_feature 1..23: note = Description: B4GALT1 siRNA antisense strands (modified); Antisense strand ID: modified_base; Underlying base sequence: 2
  modified_base 1: mod_base = OTHER; note = 2'O-methyl-adenosine
  modified_base 2: mod_base = OTHER; note = 2' Fluoro-guanosine
  modified_base 3: mod_base = um
  modified_base 4: mod_base = OTHER; note = 2'O-methyl-adenosine
  modified_base 5: mod_base = OTHER; note = 2'O-methyl-adenosine
  modified_base 6: mod_base = OTHER; note = 2'Fluoro-adenosine
  modified_base 7: mod_base = OTHER; note = 2'O-methyl-adenosine
  modified_base 8: mod_base = OTHER; note = 2' Fluoro-guanosine
  modified_base 9: mod_base = OTHER; note = 2' Fluoro-guanosine
  modified_base 10: mod_base = cm
  modified_base 11: mod_base = OTHER; note = 2'O-methyl-adenosine
  modified_base 12: mod_base = cm
  modified_base 13: mod_base = OTHER; note = 2'O-methyl-adenosine
  modified_base 14: mod_base = OTHER; note = 2' Fluoro-guanosine
  modified_base 15: mod_base = um
  modified_base 16: mod_base = OTHER; note = 2' Fluoro-cytidine
  modified_base 17: mod_base = OTHER; note = 2'O-methyl-adenosine
  modified_base 18: mod_base = um
  modified_base 19: mod_base = gm
  modified_base 20: mod_base = cm
  modified_base 21: mod_base = um
  modified_base 22: mod_base = gm
  modified_base 23: mod_base = gm
  misc_feature 1^2: note = phosphorothioate linkage
  misc_feature 2^3: note = phosphorothioate linkage
  misc_feature 21^22: note = phosphorothioate linkage
  misc_feature 22^23: note = phosphorothioate linkage
attaaaaggcacattcatgctgg

SEQ ID NO: 423 - RNA, 23 nt, synthetic construct
  source 1..23: mol_type = other RNA
  misc_feature 1..23: note = Description: B4GALT1 siRNA antisense strands (modified); Antisense strand ID: modified_base; Underlying base sequence: 2
  modified_base 1: mod_base = um
  modified_base 2: mod_base = OTHER; note = 2' Fluoro-guanosine
  modified_base 3: mod_base = um
  modified_base 4: mod_base = um
  modified_base 5: mod_base = um
  modified_base 6: mod_base = OTHER; note = 2'Fluoro-adenosine
  modified_base 7: mod_base = cm
  modified_base 8: mod_base = OTHER; note = 2' Fluoro-guanosine
  modified_base 9: mod_base = OTHER; note = 2' Fluoro-guanosine
  modified_base 10: mod_base = OTHER; note = 2'O-methyl-adenosine
  modified_base 11: mod_base = gm
  modified_base 12: mod_base = OTHER; note = 2'O-methyl-adenosine
  modified_base 13: mod_base = gm
  modified_base 14: mod_base = OTHER; note = 2' Fluoro-cytidine
  modified_base 15: mod_base = OTHER; note = 2'O-methyl-adenosine
  modified_base 16: mod_base = OTHER; note = 2' Fluoro-guanosine
  modified_base 17: mod_base = OTHER; note = 2'O-methyl-adenosine
  modified_base 18: mod_base = gm
  modified_base 19: mod_base = OTHER; note = 2'O-methyl-adenosine
  modified_base 20: mod_base = cm
  modified_base 21: mod_base = OTHER; note = 2'O-methyl-adenosine
  modified_base 22: mod_base = cm
  modified_base 23: mod_base = cm
  misc_feature 1^2: note = phosphorothioate linkage
  misc_feature 2^3: note = phosphorothioate linkage
  misc_feature 21^22: note = phosphorothioate linkage
  misc_feature 22^23: note = phosphorothioate linkage
tgtttacttagagcagagacacc

SEQ ID NO: 424 - RNA, 23 nt, synthetic construct
  source 1..23: mol_type = other RNA
  misc_feature 1..23: note = Description: B4GALT1 siRNA antisense strands (modified); Antisense strand ID: modified_base; Underlying base sequence: 2
  modified_base 1: mod_base = cm
  modified_base 2: mod_base = OTHER; note = 2'Fluoro-adenosine
  modified_base 3: mod_base = cm
  modified_base 4: mod_base = cm
  modified_base 5: mod_base = um
  modified_base 6: mod_base = OTHER; note = 2' Fluoro-cytidine
  modified_base 7: mod_base = cm
  modified_base 8: mod_base = OTHER; note = 2'Fluoro-adenosine
  modified_base 9: mod_base = OTHER; note = 2'Fluoro-adenosine
  modified_base 10: mod_base = OTHER; note = 2'O-methyl-adenosine
  modified_base 11: mod_base = OTHER; note = 2'O-methyl-adenosine
  modified_base 12: mod_base = um
  modified_base 13: mod_base = OTHER; note = 2'O-methyl-adenosine
  modified_base 14: mod_base = OTHER; note = 2' Fluoro-cytidine
  modified_base 15: mod_base = um
  modified_base 16: mod_base = OTHER; note = 2' Fluoro-guanosine
  modified_base 17: mod_base = OTHER; note = 2'O-methyl-adenosine
  modified_base 18: mod_base = OTHER; note = 2'O-methyl-adenosine
  modified_base 19: mod_base = cm
  modified_base 20: mod_base = OTHER; note = 2'O-methyl-adenosine
  modified_base 21: mod_base = um
  modified_base 22: mod_base = OTHER; note = 2'O-methyl-adenosine
  modified_base 23: mod_base = OTHER; note = 2'O-methyl-adenosine
  misc_feature 1^2: note = phosphorothioate linkage
  misc_feature 2^3: note = phosphorothioate linkage
  misc_feature 21^22: note = phosphorothioate linkage
  misc_feature 22^23: note = phosphorothioate linkage
cacctccaaaatactgaacataa

SEQ ID NO: 425 - RNA, 23 nt, synthetic construct
  source 1..23: mol_type = other RNA
  misc_feature 1..23: note = Description: B4GALT1 siRNA antisense strands (modified); Antisense strand ID: modified_base; Underlying base sequence: 2
  modified_base 1: mod_base = cm
  modified_base 2: mod_base = OTHER; note = 2'Fluoro-adenosine
  modified_base 3: mod_base = cm
  modified_base 4: mod_base = um
  modified_base 5: mod_base = um
  modified_base 6: mod_base = OTHER; note = 2' Fluoro-guanosine
  modified_base 7: mod_base = gm
  modified_base 8: mod_base = OTHER; note = 2' Fluoro-guanosine
  modified_base 9: mod_base = OTHER; note = 2'Fluoro-adenosine
  modified_base 10: mod_base = OTHER; note = 2'O-methyl-adenosine
  modified_base 11: mod_base = OTHER; note = 2'O-methyl-adenosine
  modified_base 12: mod_base = OTHER; note = 2'O-methyl-adenosine
  modified_base 13: mod_base = gm
  modified_base 14: mod_base = OTHER; note = 2' Fluoro-guanosine
  modified_base 15: mod_base = cm
  modified_base 16: mod_base = OTHER; note = 2'Fluoro-adenosine
  modified_base 17: mod_base = gm
  modified_base 18: mod_base = gm
  modified_base 19: mod_base = OTHER; note = 2'O-methyl-adenosine
  modified_base 20: mod_base = um
  modified_base 21: mod_base = cm
  modified_base 22: mod_base = um
  modified_base 23: mod_base = gm
  misc_feature 1^2: note = phosphorothioate linkage
  misc_feature 2^3: note = phosphorothioate linkage
  misc_feature 21^22: note = phosphorothioate linkage
  misc_feature 22^23: note = phosphorothioate linkage
cactttggaaaagtcaggatctg

SEQ ID NO: 426 - RNA, 23 nt, synthetic construct
  source 1..23: mol_type = other RNA
  misc_feature 1..23: note = Description: B4GALT1 siRNA antisense strands (modified); Antisense strand ID: modified_base; Underlying base sequence: 2
  modified_base 1: mod_base = OTHER; note = 2'O-methyl-adenosine
  modified_base 2: mod_base = OTHER; note = 2'Fluoro-adenosine
  modified_base 3: mod_base = OTHER; note = 2'O-methyl-adenosine
  modified_base 4: mod_base = um
  modified_base 5: mod_base = um
  modified_base 6: mod_base = OTHER; note = 2' Fluoro-cytidine
  modified_base 7: mod_base = OTHER; note = 2'O-methyl-adenosine
  modified_base 8: mod_base = OTHER; note = 2'Fluoro-adenosine
  modified_base 9: mod_base = OTHER; note = 2' Fluoro-guanosine
  modified_base 10: mod_base = um
  modified_base 11: mod_base = um
  modified_base 12: mod_base = um
  modified_base 13: mod_base = OTHER; note = 2'O-methyl-adenosine
  modified_base 14: mod_base = OTHER; note = 2' Fluoro-cytidine
  modified_base 15: mod_base = OTHER; note = 2'O-methyl-adenosine
  modified_base 16: mod_base = OTHER; note = 2' Fluoro-guanosine
  modified_base 17: mod_base = OTHER; note = 2'O-methyl-adenosine
  modified_base 18: mod_base = gm
  modified_base 19: mod_base = cm
  modified_base 20: mod_base = OTHER; note = 2'O-methyl-adenosine
  modified_base 21: mod_base = um
  modified_base 22: mod_base = gm
  modified_base 23: mod_base = cm
  misc_feature 1^2: note = phosphorothioate linkage
  misc_feature 2^3: note = phosphorothioate linkage
  misc_feature 21^22: note = phosphorothioate linkage
  misc_feature 22^23: note = phosphorothioate linkage
aaattcaagtttacatagcatgc

SEQ ID NO: 427 - RNA, 23 nt, synthetic construct
  source 1..23: mol_type = other RNA
  misc_feature 1..23: note = Description: B4GALT1 siRNA antisense strands (modified); Antisense strand ID: modified_base; Underlying base sequence: 2
  modified_base 1: mod_base = OTHER; note = 2'O-methyl-adenosine
  modified_base 2: mod_base = OTHER; note = 2'Fluoro-adenosine
  modified_base 3: mod_base = OTHER; note = 2'O-methyl-adenosine
  modified_base 4: mod_base = cm
  modified_base 5: mod_base = um
  modified_base 6: mod_base = OTHER; note = 2' Fluoro-guanosine
  modified_base 7: mod_base = um
  modified_base 8: mod_base = OTHER; note = 2' Fluoro-guanosine
  modified_base 9: mod_base = OTHER; note = 2' Fluoro-guanosine
  modified_base 10: mod_base = um
  modified_base 11: mod_base = um
  modified_base 12: mod_base = um
  modified_base 13: mod_base = OTHER; note = 2'O-methyl-adenosine
  modified_base 14: mod_base = OTHER; note = 2' Fluoro-cytidine
  modified_base 15: mod_base = um
  modified_base 16: mod_base = OTHER; note = 2' Fluoro-guanosine
  modified_base 17: mod_base = OTHER; note = 2'O-methyl-adenosine
  modified_base 18: mod_base = gm
  modified_base 19: mod_base = OTHER; note = 2'O-methyl-adenosine
  modified_base 20: mod_base = gm
  modified_base 21: mod_base = cm
  modified_base 22: mod_base = OTHER; note = 2'O-methyl-adenosine
  modified_base 23: mod_base = gm
  misc_feature 1^2: note = phosphorothioate linkage
  misc_feature 2^3: note = phosphorothioate linkage
  misc_feature 21^22: note = phosphorothioate linkage
  misc_feature 22^23: note = phosphorothioate linkage
aaactgttgtttacttagagcag

SEQ ID NO: 428 - RNA, 23 nt, synthetic construct
  source 1..23: mol_type = other RNA
  misc_feature 1..23: note = Description: B4GALT1 siRNA antisense strands (modified); Antisense strand ID: modified_base; Underlying base sequence: 2
  modified_base 1: mod_base = gm
  modified_base 2: mod_base = OTHER; note = 2' Fluoro-guanosine
  modified_base 3: mod_base = gm
  modified_base 4: mod_base = um
  modified_base 5: mod_base = OTHER; note = 2'O-methyl-adenosine
  modified_base 6: mod_base = OTHER; note = 2' Fluoro-guanosine
  modified_base 7: mod_base = cm
  modified_base 8: mod_base = OTHER; note = 2' Fluoro-guanosine
  modified_base 9: mod_base = OTHER; note = 2' Fluoro-cytidine
  modified_base 10: mod_base = um
  modified_base 11: mod_base = gm
  modified_base 12: mod_base = um
  modified_base 13: mod_base = OTHER; note = 2'O-methyl-adenosine
  modified_base 14: mod_base = OTHER; note = 2' Fluoro-cytidine
  modified_base 15: mod_base = OTHER; note = 2'O-methyl-adenosine
  modified_base 16: mod_base = OTHER; note = 2' Fluoro-guanosine
  modified_base 17: mod_base = cm
  modified_base 18: mod_base = cm
  modified_base 19: mod_base = OTHER; note = 2'O-methyl-adenosine
  modified_base 20: mod_base = gm
  modified_base 21: mod_base = cm
  modified_base 22: mod_base = OTHER; note = 2'O-methyl-adenosine
  modified_base 23: mod_base = cm
  misc_feature 1^2: note = phosphorothioate linkage
  misc_feature 2^3: note = phosphorothioate linkage
  misc_feature 21^22: note = phosphorothioate linkage
  misc_feature 22^23: note = phosphorothioate linkage
gggtatctctgtacatccagcac

SEQ ID NO: 429 - RNA, 23 nt, synthetic construct
  source 1..23: mol_type = other RNA
  misc_feature 1..23: note = Description: B4GALT1 siRNA antisense strands (modified); Antisense strand ID: modified_base; Underlying base sequence: 2
  modified_base 1: mod_base = gm
  modified_base 2: mod_base = OTHER; note = 2' Fluoro-guanosine
  modified_base 3: mod_base = um
  modified_base 4: mod_base = gm
  modified_base 5: mod_base = um
  modified_base 6: mod_base = OTHER; note = 2' Fluoro-guanosine
  modified_base 7: mod_base = um
  modified_base 8: mod_base = OTHER; note = 2'Fluoro-adenosine
  modified_base 9: mod_base = OTHER; note = 2' Fluoro-cytidine
  modified_base 10: mod_base = um
  modified_base 11: mod_base = um
  modified_base 12: mod_base = OTHER; note = 2'O-methyl-adenosine
  modified_base 13: mod_base = gm
  modified_base 14: mod_base = OTHER; note = 2'Fluoro-adenosine
  modified_base 15: mod_base = gm
  modified_base 16: mod_base = OTHER; note = 2' Fluoro-cytidine
  modified_base 17: mod_base = OTHER; note = 2'O-methyl-adenosine
  modified_base 18: mod_base = gm
  modified_base 19: mod_base = OTHER; note = 2'O-methyl-adenosine
  modified_base 20: mod_base = gm
  modified_base 21: mod_base = OTHER; note = 2'O-methyl-adenosine
  modified_base 22: mod_base = cm
  modified_base 23: mod_base = OTHER; note = 2'O-methyl-adenosine
  misc_feature 1^2: note = phosphorothioate linkage
  misc_feature 2^3: note = phosphorothioate linkage
  misc_feature 21^22: note = phosphorothioate linkage
  misc_feature 22^23: note = phosphorothioate linkage
gttgtttacttagagcagagaca

SEQ ID NO: 430 - RNA, 23 nt, synthetic construct
  source 1..23: mol_type = other RNA
  misc_feature 1..23: note = Description: B4GALT1 siRNA antisense strands (modified); Antisense strand ID: modified_base; Underlying base sequence: 2
  modified_base 1: mod_base = um
  modified_base 2: mod_base = OTHER; note = 2'Fluoro-adenosine
  modified_base 3: mod_base = gm
  modified_base 4: mod_base = gm
  modified_base 5: mod_base = OTHER; note = 2'O-methyl-adenosine
  modified_base 6: mod_base = OTHER; note = 2'Fluoro-adenosine
  modified_base 7: mod_base = OTHER; note = 2'O-methyl-adenosine
  modified_base 8: mod_base = OTHER; note = 2' Fluoro-guanosine
  modified_base 9: mod_base = OTHER; note = 2' Fluoro-guanosine
  modified_base 10: mod_base = cm
  modified_base 11: mod_base = OTHER; note = 2'O-methyl-adenosine
  modified_base 12: mod_base = OTHER; note = 2'O-methyl-adenosine
  modified_base 13: mod_base = gm
  modified_base 14: mod_base = OTHER; note = 2' Fluoro-guanosine
  modified_base 15: mod_base = um
  modified_base 16: mod_base = OTHER; note = 2' Fluoro-guanosine
  modified_base 17: mod_base = OTHER; note = 2'O-methyl-adenosine
  modified_base 18: mod_base = cm
  modified_base 19: mod_base = OTHER; note = 2'O-methyl-adenosine
  modified_base 20: mod_base = um
  modified_base 21: mod_base = OTHER; note = 2'O-methyl-adenosine
  modified_base 22: mod_base = gm
  modified_base 23: mod_base = cm
  misc_feature 1^2: note = phosphorothioate linkage
  misc_feature 2^3: note = phosphorothioate linkage
  misc_feature 21^22: note = phosphorothioate linkage
  misc_feature 22^23: note = phosphorothioate linkage
taggaaattcaagtttacatagc

SEQ ID NO: 431 - RNA, 23 nt, synthetic construct
  source 1..23: mol_type = other RNA
  misc_feature 1..23: note = Description: B4GALT1 siRNA antisense strands (modified); Antisense strand ID: modified_base; Underlying base sequence: 2
  modified_base 1: mod_base = OTHER; note = 2'O-methyl-adenosine
  modified_base 2: mod_base = OTHER; note = 2' Fluoro-guanosine
  modified_base 3: mod_base = gm
  modified_base 4: mod_base = um
  modified_base 5: mod_base = cm
  modified_base 6: mod_base = OTHER; note = 2' Fluoro-cytidine
  modified_base 7: mod_base = OTHER; note = 2'O-methyl-adenosine
  modified_base 8: mod_base = OTHER; note = 2' Fluoro-cytidine
  modified_base 9: mod_base = OTHER; note = 2' Fluoro-guanosine
  modified_base 10: mod_base = gm
  modified_base 11: mod_base = um
  modified_base 12: mod_base = gm
  modified_base 13: mod_base = OTHER; note = 2'O-methyl-adenosine
  modified_base 14: mod_base = OTHER; note = 2' Fluoro-guanosine
  modified_base 15: mod_base = um
  modified_base 16: mod_base = OTHER; note = 2' Fluoro-guanosine
  modified_base 17: mod_base = gm
  modified_base 18: mod_base = gm
  modified_base 19: mod_base = gm
  modified_base 20: mod_base = um
  modified_base 21: mod_base = OTHER; note = 2'O-methyl-adenosine
  modified_base 22: mod_base = um
  modified_base 23: mod_base = OTHER; note = 2'O-methyl-adenosine
  misc_feature 1^2: note = phosphorothioate linkage
  misc_feature 2^3: note = phosphorothioate linkage
  misc_feature 21^22: note = phosphorothioate linkage
  misc_feature 22^23: note = phosphorothioate linkage
atgtccactgtgatttgggtata

SEQ ID NO: 432 - RNA, 23 nt, synthetic construct
  source 1..23: mol_type = other RNA
  misc_feature 1..23: note = Description: B4GALT1 siRNA antisense strands (modified); Antisense strand ID: modified_base; Underlying base sequence: 2
  modified_base 1: mod_base = OTHER; note = 2'O-methyl-adenosine
  modified_base 2: mod_base = OTHER; note = 2' Fluoro-guanosine
  modified_base 3: mod_base = um
  modified_base 4: mod_base = cm
  modified_base 5: mod_base = gm
  modified_base 6: mod_base = OTHER; note = 2' Fluoro-guanosine
  modified_base 7: mod_base = um
  modified_base 8: mod_base = OTHER; note = 2' Fluoro-cytidine
  modified_base 9: mod_base = OTHER; note = 2'Fluoro-adenosine
  modified_base 10: mod_base = OTHER; note = 2'O-methyl-adenosine
  modified_base 11: mod_base = OTHER; note = 2'O-methyl-adenosine
  modified_base 12: mod_base = cm
  modified_base 13: mod_base = cm
  modified_base 14: mod_base = OTHER; note = 2' Fluoro-guanosine
  modified_base 15: mod_base = cm
  modified_base 16: mod_base = OTHER; note = 2' Fluoro-guanosine
  modified_base 17: mod_base = gm
  modified_base 18: mod_base = OTHER; note = 2'O-methyl-adenosine
  modified_base 19: mod_base = gm
  modified_base 20: mod_base = gm
  modified_base 21: mod_base = OTHER; note = 2'O-methyl-adenosine
  modified_base 22: mod_base = um
  modified_base 23: mod_base = um
  misc_feature 1^2: note = phosphorothioate linkage
  misc_feature 2^3: note = phosphorothioate linkage
  misc_feature 21^22: note = phosphorothioate linkage
  misc_feature 22^23: note = phosphorothioate linkage
attcggtcaaacctctgaggatt

SEQ ID NO: 433 - RNA, 23 nt, synthetic construct
  source 1..23: mol_type = other RNA
  misc_feature 1..23: note = Description: B4GALT1 siRNA antisense strands (modified); Antisense strand ID: modified_base; Underlying base sequence: 2
  modified_base 1: mod_base = OTHER; note = 2'O-methyl-adenosine
  modified_base 2: mod_base = OTHER; note = 2'Fluoro-adenosine
  modified_base 3: mod_base = OTHER; note = 2'O-methyl-adenosine
  modified_base 4: mod_base = um
  modified_base 5: mod_base = OTHER; note = 2'O-methyl-adenosine
  modified_base 6: mod_base = OTHER; note = 2' Fluoro-cytidine
  modified_base 7: mod_base = OTHER; note = 2'O-methyl-adenosine
  modified_base 8: mod_base = OTHER; note = 2' Fluoro-guanosine
  modified_base 9: mod_base = OTHER; note = 2'Fluoro-adenosine
  modified_base 10: mod_base = gm
  modified_base 11: mod_base = gm
  modified_base 12: mod_base = OTHER; note = 2'O-methyl-adenosine
  modified_base 13: mod_base = OTHER; note = 2'O-methyl-adenosine
  modified_base 14: mod_base = OTHER; note = 2'Fluoro-adenosine
  modified_base 15: mod_base = um
  modified_base 16: mod_base = OTHER; note = 2' Fluoro-guanosine
  modified_base 17: mod_base = cm
  modified_base 18: mod_base = OTHER; note = 2'O-methyl-adenosine
  modified_base 19: mod_base = OTHER; note = 2'O-methyl-adenosine
  modified_base 20: mod_base = gm
  modified_base 21: mod_base = um
  modified_base 22: mod_base = um
  modified_base 23: mod_base = um
  misc_feature 1^2: note = phosphorothioate linkage
  misc_feature 2^3: note = phosphorothioate linkage
  misc_feature 21^22: note = phosphorothioate linkage
  misc_feature 22^23: note = phosphorothioate linkage
aaatacataggaaattcaagttt

SEQ ID NO: 434 - RNA, 23 nt, synthetic construct
  source 1..23: mol_type = other RNA
  misc_feature 1..23: note = Description: B4GALT1 siRNA antisense strands (modified); Antisense strand ID: modified_base; Underlying base sequence: 2
  modified_base 1: mod_base = cm
  modified_base 2: mod_base = OTHER; note = 2' Fluoro-guanosine
  modified_base 3: mod_base = OTHER; note = 2'O-methyl-adenosine
  modified_base 4: mod_base = OTHER; note = 2'O-methyl-adenosine
  modified_base 5: mod_base = um
  modified_base 6: mod_base = OTHER; note = 2' Fluoro-guanosine
  modified_base 7: mod_base = OTHER; note = 2'O-methyl-adenosine
  modified_base 8: mod_base = OTHER; note = 2'Fluoro-adenosine
  modified_base 9: mod_base = OTHER; note = 2'Fluoro-adenosine
  modified_base 10: mod_base = OTHER; note = 2'O-methyl-adenosine
  modified_base 11: mod_base = gm
  modified_base 12: mod_base = gm
  modified_base 13: mod_base = cm
  modified_base 14: mod_base = OTHER; note = 2'Fluoro-adenosine
  modified_base 15: mod_base = cm
  modified_base 16: mod_base = OTHER; note = 2'Fluoro-adenosine
  modified_base 17: mod_base = um
  modified_base 18: mod_base = um
  modified_base 19: mod_base = cm
  modified_base 20: mod_base = OTHER; note = 2'O-methyl-adenosine
  modified_base 21: mod_base = um
  modified_base 22: mod_base = gm
  modified_base 23: mod_base = cm
  misc_feature 1^2: note = phosphorothioate linkage
  misc_feature 2^3: note = phosphorothioate linkage
  misc_feature 21^22: note = phosphorothioate linkage
  misc_feature 22^23: note = phosphorothioate linkage
ctaattaaaaggcacattcatgc

SEQ ID NO: 435 - RNA, 23 nt, synthetic construct
  source 1..23: mol_type = other RNA
  misc_feature 1..23: note = Description: B4GALT1 siRNA antisense strands (modified); Antisense strand ID: modified_base; Underlying base sequence: 2
  modified_base 1: mod_base = cm
  modified_base 2: mod_base = OTHER; note = 2' Fluoro-cytidine
  modified_base 3: mod_base = OTHER; note = 2'O-methyl-adenosine
  modified_base 4: mod_base = cm
  modified_base 5: mod_base = cm
  modified_base 6: mod_base = OTHER; note = 2' Fluoro-guanosine
  modified_base 7: mod_base = um
  modified_base 8: mod_base = OTHER; note = 2' Fluoro-guanosine
  modified_base 9: mod_base = OTHER; note = 2' Fluoro-guanosine
  modified_base 10: mod_base = gm
  modified_base 11: mod_base = OTHER; note = 2'O-methyl-adenosine
  modified_base 12: mod_base = gm
  modified_base 13: mod_base = gm
  modified_base 14: mod_base = OTHER; note = 2'Fluoro-adenosine
  modified_base 15: mod_base = gm
  modified_base 16: mod_base = OTHER; note = 2'Fluoro-adenosine
  modified_base 17: mod_base = gm
  modified_base 18: mod_base = OTHER; note = 2'O-methyl-adenosine
  modified_base 19: mod_base = cm
  modified_base 20: mod_base = gm
  modified_base 21: mod_base = cm
  modified_base 22: mod_base = OTHER; note = 2'O-methyl-adenosine
  modified_base 23: mod_base = gm
  misc_feature 1^2: note = phosphorothioate linkage
  misc_feature 2^3: note = phosphorothioate linkage
  misc_feature 21^22: note = phosphorothioate linkage
  misc_feature 22^23: note = phosphorothioate linkage
ccaccttgtgaggagagacgcag

SEQ ID NO: 436 - RNA, 23 nt, synthetic construct
  source 1..23: mol_type = other RNA
  misc_feature 1..23: note = Description: B4GALT1 siRNA antisense strands (modified); Antisense strand ID: modified_base; Underlying base sequence: 2
  modified_base 1: mod_base = um
  modified_base 2: mod_base = OTHER; note = 2' Fluoro-guanosine
  modified_base 3: mod_base = um
  modified_base 4: mod_base = cm
  modified_base 5: mod_base = cm
  modified_base 6: mod_base = OTHER; note = 2'Fluoro-adenosine
  modified_base 7: mod_base = cm
  modified_base 8: mod_base = OTHER; note = 2' Fluoro-guanosine
  modified_base 9: mod_base = OTHER; note = 2' Fluoro-guanosine
  modified_base 10: mod_base = um
  modified_base 11: mod_base = gm
  modified_base 12: mod_base = OTHER; note = 2'O-methyl-adenosine
  modified_base 13: mod_base = um
  modified_base 14: mod_base = OTHER; note = 2' Fluoro-guanosine
  modified_base 15: mod_base = um
  modified_base 16: mod_base = OTHER; note = 2' Fluoro-guanosine
  modified_base 17: mod_base = gm
  modified_base 18: mod_base = gm
  modified_base 19: mod_base = um
  modified_base 20: mod_base = OTHER; note = 2'O-methyl-adenosine
  modified_base 21: mod_base = um
  modified_base 22: mod_base = OTHER; note = 2'O-methyl-adenosine
  modified_base 23: mod_base = cm
  misc_feature 1^2: note = phosphorothioate linkage
  misc_feature 2^3: note = phosphorothioate linkage
  misc_feature 21^22: note = phosphorothioate linkage
  misc_feature 22^23: note = phosphorothioate linkage
tgtccactgtgatttgggtatac

SEQ ID NO: 437 - RNA, 23 nt, synthetic construct
  source 1..23: mol_type = other RNA
  misc_feature 1..23: note = Description: B4GALT1 siRNA antisense strands (modified); Antisense strand ID: modified_base; Underlying base sequence: 2
  modified_base 1: mod_base = um
  modified_base 2: mod_base = OTHER; note = 2'Fluoro-adenosine
  modified_base 3: mod_base = cm
  modified_base 4: mod_base = OTHER; note = 2'O-methyl-adenosine
  modified_base 5: mod_base = um
  modified_base 6: mod_base = OTHER; note = 2'Fluoro-adenosine
  modified_base 7: mod_base = gm
  modified_base 8: mod_base = OTHER; note = 2' Fluoro-guanosine
  modified_base 9: mod_base = OTHER; note = 2'Fluoro-adenosine
  modified_base 10: mod_base = OTHER; note = 2'O-methyl-adenosine
  modified_base 11: mod_base = OTHER; note = 2'O-methyl-adenosine
  modified_base 12: mod_base = um
  modified_base 13: mod_base = um
  modified_base 14: mod_base = OTHER; note = 2' Fluoro-cytidine
  modified_base 15: mod_base = OTHER; note = 2'O-methyl-adenosine
  modified_base 16: mod_base = OTHER; note = 2'Fluoro-adenosine
  modified_base 17: mod_base = gm
  modified_base 18: mod_base = um
  modified_base 19: mod_base = um
  modified_base 20: mod_base = um
  modified_base 21: mod_base = OTHER; note = 2'O-methyl-adenosine
  modified_base 22: mod_base = cm
  modified_base 23: mod_base = OTHER; note = 2'O-methyl-adenosine
  misc_feature 1^2: note = phosphorothioate linkage
  misc_feature 2^3: note = phosphorothioate linkage
  misc_feature 21^22: note = phosphorothioate linkage
  misc_feature 22^23: note = phosphorothioate linkage
tacataggaaattcaagtttaca

SEQ ID NO: 438 - RNA, 23 nt, synthetic construct
  source 1..23: mol_type = other RNA
  misc_feature 1..23: note = Description: B4GALT1 siRNA antisense strands (modified); Antisense strand ID: modified_base; Underlying base sequence: 2
  modified_base 1: mod_base = cm
  modified_base 2: mod_base = OTHER; note = 2' Fluoro-guanosine
  modified_base 3: mod_base = um
  modified_base 4: mod_base = um
  modified_base 5: mod_base = OTHER; note = 2'O-methyl-adenosine
  modified_base 6: mod_base = OTHER; note = 2' Fluoro-cytidine
  modified_base 7: mod_base = OTHER; note = 2'O-methyl-adenosine
  modified_base 8: mod_base = OTHER; note = 2' Fluoro-guanosine
  modified_base 9: mod_base = OTHER; note = 2' Fluoro-guanosine
  modified_base 10: mod_base = cm
  modified_base 11: mod_base = OTHER; note = 2'O-methyl-adenosine
  modified_base 12: mod_base = gm
  modified_base 13: mod_base = OTHER; note = 2'O-methyl-adenosine
  modified_base 14: mod_base = OTHER; note = 2'Fluoro-adenosine
  modified_base 15: mod_base = OTHER; note = 2'O-methyl-adenosine
  modified_base 16: mod_base = OTHER; note = 2' Fluoro-guanosine
  modified_base 17: mod_base = cm
  modified_base 18: mod_base = OTHER; note = 2'O-methyl-adenosine
  modified_base 19: mod_base = gm
  modified_base 20: mod_base = OTHER; note = 2'O-methyl-adenosine
  modified_base 21: mod_base = cm
  modified_base 22: mod_base = OTHER; note = 2'O-methyl-adenosine
  modified_base 23: mod_base = OTHER; note = 2'O-methyl-adenosine
  misc_feature 1^2: note = phosphorothioate linkage
  misc_feature 2^3: note = phosphorothioate linkage
  misc_feature 21^22: note = phosphorothioate linkage
  misc_feature 22^23: note = phosphorothioate linkage
ctttacattcagaaatcagacaa

SEQ ID NO: 439 - RNA, 23 nt, synthetic construct
  source 1..23: mol_type = other RNA
  misc_feature 1..23: note = Description: B4GALT1 siRNA antisense strands (modified); Antisense strand ID: modified_base; Underlying base sequence: 2
  modified_base 1: mod_base = cm
  modified_base 2: mod_base = OTHER; note = 2' Fluoro-cytidine
  modified_base 3: mod_base = OTHER; note = 2'O-methyl-adenosine
  modified_base 4: mod_base = OTHER; note = 2'O-methyl-adenosine
  modified_base 5: mod_base = um
  modified_base 6: mod_base = OTHER; note = 2'Fluoro-adenosine
  modified_base 7: mod_base = OTHER; note = 2'O-methyl-adenosine
  modified_base 8: mod_base = OTHER; note = 2' Fluoro-guanosine
  modified_base 9: mod_base = OTHER; note = 2' Fluoro-guanosine
  modified_base 10: mod_base = OTHER; note = 2'O-methyl-adenosine
  modified_base 11: mod_base = um
  modified_base 12: mod_base = um
  modified_base 13: mod_base = OTHER; note = 2'O-methyl-adenosine
  modified_base 14: mod_base = OTHER; note = 2' Fluoro-guanosine
  modified_base 15: mod_base = gm
  modified_base 16: mod_base = OTHER; note = 2'Fluoro-adenosine
  modified_base 17: mod_base = OTHER; note = 2'O-methyl-adenosine
  modified_base 18: mod_base = OTHER; note = 2'O-methyl-adenosine
  modified_base 19: mod_base = um
  modified_base 20: mod_base = cm
  modified_base 21: mod_base = cm
  modified_base 22: mod_base = OTHER; note = 2'O-methyl-adenosine
  modified_base 23: mod_base = um
  misc_feature 1^2: note = phosphorothioate linkage
  misc_feature 2^3: note = phosphorothioate linkage
  misc_feature 21^22: note = phosphorothioate linkage
  misc_feature 22^23: note = phosphorothioate linkage
ccaataattattaggaaatccat

SEQ ID NO: 440 - RNA, 23 nt, synthetic construct
  source 1..23: mol_type = other RNA
  misc_feature 1..23: note = Description: B4GALT1 siRNA antisense strands (modified); Antisense strand ID: modified_base; Underlying base sequence: 2
  modified_base 1: mod_base = um
  modified_base 2: mod_base = OTHER; note = 2' Fluoro-guanosine
  modified_base 3: mod_base = cm
  modified_base 4: mod_base = um
  modified_base 5: mod_base = cm
  modified_base 6: mod_base = OTHER; note = 2' Fluoro-cytidine
  modified_base 7: mod_base = um
  modified_base 8: mod_base = OTHER; note = 2' Fluoro-guanosine
  modified_base 9: mod_base = OTHER; note = 2' Fluoro-cytidine
  modified_base 10: mod_base = cm
  modified_base 11: mod_base = gm
  modified_base 12: mod_base = gm
  modified_base 13: mod_base = um
  modified_base 14: mod_base = OTHER; note = 2' Fluoro-guanosine
  modified_base 15: mod_base = gm
  modified_base 16: mod_base = OTHER; note = 2' Fluoro-cytidine
  modified_base 17: mod_base = gm
  modified_base 18: mod_base = gm
  modified_base 19: mod_base = OTHER; note = 2'O-methyl-adenosine
  modified_base 20: mod_base = OTHER; note = 2'O-methyl-adenosine
  modified_base 21: mod_base = um
  modified_base 22: mod_base = gm
  modified_base 23: mod_base = gm
  misc_feature 1^2: note = phosphorothioate linkage
  misc_feature 2^3: note = phosphorothioate linkage
  misc_feature 21^22: note = phosphorothioate linkage
  misc_feature 22^23: note = phosphorothioate linkage
tgctcctgccggttgcggaatgg

SEQ ID NO: 441 - RNA, 23 nt, synthetic construct
  source 1..23: mol_type = other RNA
  misc_feature 1..23: note = Description: B4GALT1 siRNA antisense strands (modified); Antisense strand ID: modified_base; Underlying base sequence: 2
  modified_base 1: mod_base = um
  modified_base 2: mod_base = OTHER; note = 2' Fluoro-guanosine
  modified_base 3: mod_base = gm
  modified_base 4: mod_base = um
  modified_base 5: mod_base = um
  modified_base 6: mod_base = OTHER; note = 2' Fluoro-guanosine
  modified_base 7: mod_base = OTHER; note = 2'O-methyl-adenosine
  modified_base 8: mod_base = OTHER; note = 2' Fluoro-cytidine
  modified_base 9: mod_base = OTHER; note = 2' Fluoro-guanosine
  modified_base 10: mod_base = um
  modified_base 11: mod_base = OTHER; note = 2'O-methyl-adenosine
  modified_base 12: mod_base = gm
  modified_base 13: mod_base = OTHER; note = 2'O-methyl-adenosine
  modified_base 14: mod_base = OTHER; note = 2' Fluoro-guanosine
  modified_base 15: mod_base = cm
  modified_base 16: mod_base = OTHER; note = 2'Fluoro-adenosine
  modified_base 17: mod_base = gm
  modified_base 18: mod_base = OTHER; note = 2'O-methyl-adenosine
  modified_base 19: mod_base = gm
  modified_base 20: mod_base = OTHER; note = 2'O-methyl-adenosine
  modified_base 21: mod_base = cm
  modified_base 22: mod_base = OTHER; note = 2'O-methyl-adenosine
  modified_base 23: mod_base = cm
  misc_feature 1^2: note = phosphorothioate linkage
  misc_feature 2^3: note = phosphorothioate linkage
  misc_feature 21^22: note = phosphorothioate linkage
  misc_feature 22^23: note = phosphorothioate linkage
ttgtttacttagagcagagacac

SEQ ID NO: 442 - RNA, 23 nt, synthetic construct
  source 1..23: mol_type = other RNA
  misc_feature 1..23: note = Description: B4GALT1 siRNA antisense strands (modified); Antisense strand ID: modified_base; Underlying base sequence: 2
  modified_base 1: mod_base = OTHER; note = 2'O-methyl-adenosine
  modified_base 2: mod_base = OTHER; note = 2' Fluoro-cytidine
  modified_base 3: mod_base = um
  modified_base 4: mod_base = gm
  modified_base 5: mod_base = um
  modified_base 6: mod_base = OTHER; note = 2' Fluoro-guanosine
  modified_base 7: mod_base = gm
  modified_base 8: mod_base = OTHER; note = 2' Fluoro-guanosine
  modified_base 9: mod_base = OTHER; note = 2' Fluoro-guanosine
  modified_base 10: mod_base = um
  modified_base 11: mod_base = OTHER; note = 2'O-methyl-adenosine
  modified_base 12: mod_base = cm
  modified_base 13: mod_base = um
  modified_base 14: mod_base = OTHER; note = 2' Fluoro-guanosine
  modified_base 15: mod_base = OTHER; note = 2'O-methyl-adenosine
  modified_base 16: mod_base = OTHER; note = 2' Fluoro-guanosine
  modified_base 17: mod_base = OTHER; note = 2'O-methyl-adenosine
  modified_base 18: mod_base = gm
  modified_base 19: mod_base = cm
  modified_base 20: mod_base = OTHER; note = 2'O-methyl-adenosine
  modified_base 21: mod_base = gm
  modified_base 22: mod_base = OTHER; note = 2'O-methyl-adenosine
  modified_base 23: mod_base = gm
  misc_feature 1^2: note = phosphorothioate linkage
  misc_feature 2^3: note = phosphorothioate linkage
  misc_feature 21^22: note = phosphorothioate linkage
  misc_feature 22^23: note = phosphorothioate linkage
actgttgtttacttagagcagag

SEQ ID NO: 443 - RNA, 23 nt, synthetic construct
  source 1..23: mol_type = other RNA
  misc_feature 1..23: note = Description: B4GALT1 siRNA antisense strands (modified); Antisense strand ID: modified_base; Underlying base sequence: 2
  modified_base 1: mod_base = cm
  modified_base 2: mod_base = OTHER; note = 2' Fluoro-guanosine
  modified_base 3: mod_base = um
  modified_base 4: mod_base = um
  modified_base 5: mod_base = um
  modified_base 6: mod_base = OTHER; note = 2'Fluoro-adenosine
  modified_base 7: mod_base = OTHER; note = 2'O-methyl-adenosine
  modified_base 8: mod_base = OTHER; note = 2' Fluoro-guanosine
  modified_base 9: mod_base = OTHER; note = 2' Fluoro-guanosine
  modified_base 10: mod_base = cm
  modified_base 11: mod_base = OTHER; note = 2'O-methyl-adenosine
  modified_base 12: mod_base = cm
  modified_base 13: mod_base = um
  modified_base 14: mod_base = OTHER; note = 2' Fluoro-guanosine
  modified_base 15: mod_base = um
  modified_base 16: mod_base = OTHER; note = 2' Fluoro-guanosine
  modified_base 17: mod_base = gm
  modified_base 18: mod_base = OTHER; note = 2'O-methyl-adenosine
  modified_base 19: mod_base = OTHER; note = 2'O-methyl-adenosine
  modified_base 20: mod_base = OTHER; note = 2'O-methyl-adenosine
  modified_base 21: mod_base = OTHER; note = 2'O-methyl-adenosine
  modified_base 22: mod_base = gm
  modified_base 23: mod_base = um
  misc_feature 1^2: note = phosphorothioate linkage
  misc_feature 2^3: note = phosphorothioate linkage
  misc_feature 21^22: note = phosphorothioate linkage
  misc_feature 22^23: note = phosphorothioate linkage
cttttaaggcactttggaaaagt

SEQ ID NO: 444 - RNA, 23 nt, synthetic construct
  source 1..23: mol_type = other RNA
  misc_feature 1..23: note = Description: B4GALT1 siRNA antisense strands (modified); Antisense strand ID: modified_base; Underlying base sequence: 2
  modified_base 1: mod_base = OTHER; note = 2'O-methyl-adenosine
  modified_base 2: mod_base = OTHER; note = 2' Fluoro-cytidine
  modified_base 3: mod_base = cm
  modified_base 4: mod_base = um
  modified_base 5: mod_base = cm
  modified_base 6: mod_base = OTHER; note = 2' Fluoro-cytidine
  modified_base 7: mod_base = OTHER; note = 2'O-methyl-adenosine
  modified_base 8: mod_base = OTHER; note = 2'Fluoro-adenosine
  modified_base 9: mod_base = OTHER; note = 2'Fluoro-adenosine
  modified_base 10: mod_base = OTHER; note = 2'O-methyl-adenosine
  modified_base 11: mod_base = um
  modified_base 12: mod_base = OTHER; note = 2'O-methyl-adenosine
  modified_base 13: mod_base = cm
  modified_base 14: mod_base = OTHER; note = 2' Fluoro-guanosine
  modified_base 15: mod_base = gm
  modified_base 16: mod_base = OTHER; note = 2'Fluoro-adenosine
  modified_base 17: mod_base = OTHER; note = 2'O-methyl-adenosine
  modified_base 18: mod_base = cm
  modified_base 19: mod_base = OTHER; note = 2'O-methyl-adenosine
  modified_base 20: mod_base = um
  modified_base 21: mod_base = OTHER; note = 2'O-methyl-adenosine
  modified_base 22: mod_base = OTHER; note = 2'O-methyl-adenosine
  modified_base 23: mod_base = gm
  misc_feature 1^2: note = phosphorothioate linkage
  misc_feature 2^3: note = phosphorothioate linkage
  misc_feature 21^22: note = phosphorothioate linkage
  misc_feature 22^23: note = phosphorothioate linkage
acctccaaaatactgaacataag

SEQ ID NO: 445 - RNA, 23 nt, synthetic construct
  source 1..23: mol_type = other RNA
  misc_feature 1..23: note = Description: B4GALT1 siRNA antisense strands (modified); Antisense strand ID: modified_base; Underlying base sequence: 2
  modified_base 1: mod_base = cm
  modified_base 2: mod_base = OTHER; note = 2' Fluoro-guanosine
  modified_base 3: mod_base = gm
  modified_base 4: mod_base = um
  modified_base 5: mod_base = gm
  modified_base 6: mod_base = OTHER; note = 2' Fluoro-guanosine
  modified_base 7: mod_base = cm
  modified_base 8: mod_base = OTHER; note = 2' Fluoro-cytidine
  modified_base 9: mod_base = OTHER; note = 2' Fluoro-cytidine
  modified_base 10: mod_base = gm
  modified_base 11: mod_base = OTHER; note = 2'O-methyl-adenosine
  modified_base 12: mod_base = um
  modified_base 13: mod_base = gm
  modified_base 14: mod_base = OTHER; note = 2' Fluoro-guanosine
  modified_base 15: mod_base = cm
  modified_base 16: mod_base = OTHER; note = 2' Fluoro-cytidine
  modified_base 17: mod_base = OTHER; note = 2'O-methyl-adenosine
  modified_base 18: mod_base = cm
  modified_base 19: mod_base = um
  modified_base 20: mod_base = gm
  modified_base 21: mod_base = um
  modified_base 22: mod_base = gm
  modified_base 23: mod_base = OTHER; note = 2'O-methyl-adenosine
  misc_feature 1^2: note = phosphorothioate linkage
  misc_feature 2^3: note = phosphorothioate linkage
  misc_feature 21^22: note = phosphorothioate linkage
  misc_feature 22^23: note = phosphorothioate linkage
cggtgtcccgatgtccactgtga

SEQ ID NO: 446 - RNA, 23 nt, synthetic construct
  source 1..23: mol_type = other RNA
  misc_feature 1..23: note = Description: B4GALT1 siRNA antisense strands (modified); Antisense strand ID: modified_base; Underlying base sequence: 2
  modified_base 1: mod_base = cm
  modified_base 2: mod_base = OTHER; note = 2' Fluoro-cytidine
  modified_base 3: mod_base = cm
  modified_base 4: mod_base = cm
  modified_base 5: mod_base = OTHER; note = 2'O-methyl-adenosine
  modified_base 6: mod_base = OTHER; note = 2'Fluoro-adenosine
  modified_base 7: mod_base = um
  modified_base 8: mod_base = OTHER; note = 2'Fluoro-adenosine
  modified_base 9: mod_base = OTHER; note = 2'Fluoro-adenosine
  modified_base 10: mod_base = um
  modified_base 11: mod_base = um
  modified_base 12: mod_base = OTHER; note = 2'O-methyl-adenosine
  modified_base 13: mod_base = um
  modified_base 14: mod_base = OTHER; note = 2' Fluoro-guanosine
  modified_base 15: mod_base = OTHER; note = 2'O-methyl-adenosine
  modified_base 16: mod_base = OTHER; note = 2' Fluoro-guanosine
  modified_base 17: mod_base = gm
  modified_base 18: mod_base = OTHER; note = 2'O-methyl-adenosine
  modified_base 19: mod_base = OTHER; note = 2'O-methyl-adenosine
  modified_base 20: mod_base = OTHER; note = 2'O-methyl-adenosine
  modified_base 21: mod_base = um
  modified_base 22: mod_base = cm
  modified_base 23: mod_base = cm
  misc_feature 1^2: note = phosphorothioate linkage
  misc_feature 2^3: note = phosphorothioate linkage
  misc_feature 21^22: note = phosphorothioate linkage
  misc_feature 22^23: note = phosphorothioate linkage
ccccaataattattaggaaatcc

SEQ ID NO: 447 - RNA, 23 nt, synthetic construct
  source 1..23: mol_type = other RNA
  misc_feature 1..23: note = Description: B4GALT1 siRNA antisense strands (modified); Antisense strand ID: modified_base; Underlying base sequence: 2
  modified_base 1: mod_base = gm
  modified_base 2: mod_base = OTHER; note = 2'Fluoro-adenosine
  modified_base 3: mod_base = um
  modified_base 4: mod_base = gm
  modified_base 5: mod_base = um
  modified_base 6: mod_base = OTHER; note = 2' Fluoro-cytidine
  modified_base 7: mod_base = cm
  modified_base 8: mod_base = OTHER; note = 2'Fluoro-adenosine
  modified_base 9: mod_base = OTHER; note = 2' Fluoro-cytidine
  modified_base 10: mod_base = um
  modified_base 11: mod_base = gm
  modified_base 12: mod_base = um
  modified_base 13: mod_base = gm
  modified_base 14: mod_base = OTHER; note = 2'Fluoro-adenosine
  modified_base 15: mod_base = um
  modified_base 16: mod_base = OTHER; note = 2' Fluoro-guanosine
  modified_base 17: mod_base = um
  modified_base 18: mod_base = gm
  modified_base 19: mod_base = gm
  modified_base 20: mod_base = gm
  modified_base 21: mod_base = um
  modified_base 22: mod_base = OTHER; note = 2'O-methyl-adenosine
  modified_base 23: mod_base = um
  misc_feature 1^2: note = phosphorothioate linkage
  misc_feature 2^3: note = phosphorothioate linkage
  misc_feature 21^22: note = phosphorothioate linkage
  misc_feature 22^23: note = phosphorothioate linkage
gatgtccactgtgatttgggtat

SEQ ID NO: 448 - RNA, 23 nt, synthetic construct
  source 1..23: mol_type = other RNA
  misc_feature 1..23: note = Description: B4GALT1 siRNA antisense strands (modified); Antisense strand ID: modified_base; Underlying base sequence: 2
  modified_base 1: mod_base = um
  modified_base 2: mod_base = OTHER; note = 2'Fluoro-adenosine
  modified_base 3: mod_base = gm
  modified_base 4: mod_base = OTHER; note = 2'O-methyl-adenosine
  modified_base 5: mod_base = gm
  modified_base 6: mod_base = OTHER; note = 2' Fluoro-cytidine
  modified_base 7: mod_base = OTHER; note = 2'O-methyl-adenosine
  modified_base 8: mod_base = OTHER; note = 2' Fluoro-guanosine
  modified_base 9: mod_base = OTHER; note = 2'Fluoro-adenosine
  modified_base 10: mod_base = gm
  modified_base 11: mod_base = OTHER; note = 2'O-methyl-adenosine
  modified_base 12: mod_base = cm
  modified_base 13: mod_base = OTHER; note = 2'O-methyl-adenosine
  modified_base 14: mod_base = OTHER; note = 2' Fluoro-cytidine
  modified_base 15: mod_base = cm
  modified_base 16: mod_base = OTHER; note = 2' Fluoro-guanosine
  modified_base 17: mod_base = cm
  modified_base 18: mod_base = cm
  modified_base 19: mod_base = OTHER; note = 2'O-methyl-adenosine
  modified_base 20: mod_base = OTHER; note = 2'O-methyl-adenosine
  modified_base 21: mod_base = OTHER; note = 2'O-methyl-adenosine
  modified_base 22: mod_base = OTHER; note = 2'O-methyl-adenosine
  modified_base 23: mod_base = um
  misc_feature 1^2: note = phosphorothioate linkage
  misc_feature 2^3: note = phosphorothioate linkage
  misc_feature 21^22: note = phosphorothioate linkage
  misc_feature 22^23: note = phosphorothioate linkage
tagagcagagacacctccaaaat

SEQ ID NO: 449 - RNA, 23 nt, synthetic construct
  source 1..23: mol_type = other RNA
  misc_feature 1..23: note = Description: B4GALT1 siRNA antisense strands (modified); Antisense strand ID: modified_base; Underlying base sequence: 2
  modified_base 1: mod_base = cm
  modified_base 2: mod_base = OTHER; note = 2' Fluoro-cytidine
  modified_base 3: mod_base = gm
  modified_base 4: mod_base = OTHER; note = 2'O-methyl-adenosine
  modified_base 5: mod_base = um
  modified_base 6: mod_base = OTHER; note = 2' Fluoro-guanosine
  modified_base 7: mod_base = um
  modified_base 8: mod_base = OTHER; note = 2' Fluoro-cytidine
  modified_base 9: mod_base = OTHER; note = 2' Fluoro-cytidine
  modified_base 10: mod_base = OTHER; note = 2'O-methyl-adenosine
  modified_base 11: mod_base = cm
  modified_base 12: mod_base = um
  modified_base 13: mod_base = gm
  modified_base 14: mod_base = OTHER; note = 2' Fluoro-guanosine
  modified_base 15: mod_base = gm
  modified_base 16: mod_base = OTHER; note = 2'Fluoro-adenosine
  modified_base 17: mod_base = um
  modified_base 18: mod_base = um
  modified_base 19: mod_base = um
  modified_base 20: mod_base = gm
  modified_base 21: mod_base = gm
  modified_base 22: mod_base = gm
  modified_base 23: mod_base = um
  misc_feature 1^2: note = phosphorothioate linkage
  misc_feature 2^3: note = phosphorothioate linkage
  misc_feature 21^22: note = phosphorothioate linkage
  misc_feature 22^23: note = phosphorothioate linkage
ccgatgtccactgtgatttgggt

SEQ ID NO: 450 - RNA, 23 nt, synthetic construct
  source 1..23: mol_type = other RNA
  misc_feature 1..23: note = Description: B4GALT1 siRNA antisense strands (modified); Antisense strand ID: modified_base; Underlying base sequence: 2
  modified_base 1: mod_base = um
  modified_base 2: mod_base = OTHER; note = 2' Fluoro-cytidine
  modified_base 3: mod_base = um
  modified_base 4: mod_base = um
  modified_base 5: mod_base = um
  modified_base 6: mod_base = OTHER; note = 2' Fluoro-guanosine
  modified_base 7: mod_base = OTHER; note = 2'O-methyl-adenosine
  modified_base 8: mod_base = OTHER; note = 2'Fluoro-adenosine
  modified_base 9: mod_base = OTHER; note = 2' Fluoro-guanosine
  modified_base 10: mod_base = gm
  modified_base 11: mod_base = cm
  modified_base 12: mod_base = OTHER; note = 2'O-methyl-adenosine
  modified_base 13: mod_base = cm
  modified_base 14: mod_base = OTHER; note = 2' Fluoro-guanosine
  modified_base 15: mod_base = um
  modified_base 16: mod_base = OTHER; note = 2' Fluoro-guanosine
  modified_base 17: mod_base = gm
  modified_base 18: mod_base = gm
  modified_base 19: mod_base = OTHER; note = 2'O-methyl-adenosine
  modified_base 20: mod_base = OTHER; note = 2'O-methyl-adenosine
  modified_base 21: mod_base = OTHER; note = 2'O-methyl-adenosine
  modified_base 22: mod_base = OTHER; note = 2'O-methyl-adenosine
  modified_base 23: mod_base = gm
  misc_feature 1^2: note = phosphorothioate linkage
  misc_feature 2^3: note = phosphorothioate linkage
  misc_feature 21^22: note = phosphorothioate linkage
  misc_feature 22^23: note = phosphorothioate linkage
tcttttaaggcactttggaaaag

SEQ ID NO: 451 - RNA, 23 nt, synthetic construct
  source 1..23: mol_type = other RNA
  misc_feature 1..23: note = Description: B4GALT1 siRNA antisense strands (modified); Antisense strand ID: modified_base; Underlying base sequence: 2
  modified_base 1: mod_base = cm
  modified_base 2: mod_base = OTHER; note = 2' Fluoro-cytidine
  modified_base 3: mod_base = cm
  modified_base 4: mod_base = OTHER; note = 2'O-methyl-adenosine
  modified_base 5: mod_base = OTHER; note = 2'O-methyl-adenosine
  modified_base 6: mod_base = OTHER; note = 2' Fluoro-guanosine
  modified_base 7: mod_base = OTHER; note = 2'O-methyl-adenosine
  modified_base 8: mod_base = OTHER; note = 2'Fluoro-adenosine
  modified_base 9: mod_base = OTHER; note = 2' Fluoro-guanosine
  modified_base 10: mod_base = um
  modified_base 11: mod_base = OTHER; note = 2'O-methyl-adenosine
  modified_base 12: mod_base = um
  modified_base 13: mod_base = um
  modified_base 14: mod_base = OTHER; note = 2'Fluoro-adenosine
  modified_base 15: mod_base = gm
  modified_base 16: mod_base = OTHER; note = 2' Fluoro-guanosine
  modified_base 17: mod_base = OTHER; note = 2'O-methyl-adenosine
  modified_base 18: mod_base = OTHER; note = 2'O-methyl-adenosine
  modified_base 19: mod_base = OTHER; note = 2'O-methyl-adenosine
  modified_base 20: mod_base = um
  modified_base 21: mod_base = cm
  modified_base 22: mod_base = cm
  modified_base 23: mod_base = OTHER; note = 2'O-methyl-adenosine
  misc_feature 1^2: note = phosphorothioate linkage
  misc_feature 2^3: note = phosphorothioate linkage
  misc_feature 21^22: note = phosphorothioate linkage
  misc_feature 22^23: note = phosphorothioate linkage
cccaataattattaggaaatcca

SEQ ID NO: 452 - RNA, 23 nt, synthetic construct
  source 1..23: mol_type = other RNA
  misc_feature 1..23: note = Description: B4GALT1 siRNA antisense strands (modified); Antisense strand ID: modified_base; Underlying base sequence: 2
  modified_base 1: mod_base = gm
  modified_base 2: mod_base = OTHER; note = 2' Fluoro-guanosine
  modified_base 3: mod_base = cm
  modified_base 4: mod_base = cm
  modified_base 5: mod_base = OTHER; note = 2'O-methyl-adenosine
  modified_base 6: mod_base = OTHER; note = 2' Fluoro-cytidine
  modified_base 7: mod_base = um
  modified_base 8: mod_base = OTHER; note = 2' Fluoro-guanosine
  modified_base 9: mod_base = OTHER; note = 2' Fluoro-guanosine
  modified_base 10: mod_base = gm
  modified_base 11: mod_base = OTHER; note = 2'O-methyl-adenosine
  modified_base 12: mod_base = um
  modified_base 13: mod_base = um
  modified_base 14: mod_base = OTHER; note = 2' Fluoro-guanosine
  modified_base 15: mod_base = gm
  modified_base 16: mod_base = OTHER; note = 2' Fluoro-guanosine
  modified_base 17: mod_base = gm
  modified_base 18: mod_base = um
  modified_base 19: mod_base = OTHER; note = 2'O-methyl-adenosine
  modified_base 20: mod_base = um
  modified_base 21: mod_base = OTHER; note = 2'O-methyl-adenosine
  modified_base 22: mod_base = cm
  modified_base 23: mod_base = OTHER; note = 2'O-methyl-adenosine
  misc_feature 1^2: note = phosphorothioate linkage
  misc_feature 2^3: note = phosphorothioate linkage
  misc_feature 21^22: note = phosphorothioate linkage
  misc_feature 22^23: note = phosphorothioate linkage
gtccactgtgatttgggtataca

SEQ ID NO: 453 - RNA, 23 nt, synthetic construct
  source 1..23: mol_type = other RNA
  misc_feature 1..23: note = Description: B4GALT1 siRNA antisense strands (modified); Antisense strand ID: modified_base; Underlying base sequence: 2
  modified_base 1: mod_base = gm
  modified_base 2: mod_base = OTHER; note = 2' Fluoro-guanosine
  modified_base 3: mod_base = OTHER; note = 2'O-methyl-adenosine
  modified_base 4: mod_base = gm
  modified_base 5: mod_base = gm
  modified_base 6: mod_base = OTHER; note = 2' Fluoro-guanosine
  modified_base 7: mod_base = gm
  modified_base 8: mod_base = OTHER; note = 2'Fluoro-adenosine
  modified_base 9: mod_base = OTHER; note = 2' Fluoro-guanosine
  modified_base 10: mod_base = um
  modified_base 11: mod_base = gm
  modified_base 12: mod_base = OTHER; note = 2'O-methyl-adenosine
  modified_base 13: mod_base = gm
  modified_base 14: mod_base = OTHER; note = 2' Fluoro-guanosine
  modified_base 15: mod_base = um
  modified_base 16: mod_base = OTHER; note = 2' Fluoro-cytidine
  modified_base 17: mod_base = OTHER; note = 2'O-methyl-adenosine
  modified_base 18: mod_base = OTHER; note = 2'O-methyl-adenosine
  modified_base 19: mod_base = OTHER; note = 2'O-methyl-adenosine
  modified_base 20: mod_base = cm
  modified_base 21: mod_base = cm
  modified_base 22: mod_base = OTHER; note = 2'O-methyl-adenosine
  modified_base 23: mod_base = um
  misc_feature 1^2: note = phosphorothioate linkage
  misc_feature 2^3: note = phosphorothioate linkage
  misc_feature 21^22: note = phosphorothioate linkage
  misc_feature 22^23: note = phosphorothioate linkage
gtaggtgagtgagttcaaaccat

SEQ ID NO: 454 - RNA, 23 nt, synthetic construct
  source 1..23: mol_type = other RNA
  misc_feature 1..23: note = Description: B4GALT1 siRNA antisense strands (modified); Antisense strand ID: modified_base; Underlying base sequence: 2
  modified_base 1: mod_base = OTHER; note = 2'O-methyl-adenosine
  modified_base 2: mod_base = OTHER; note = 2' Fluoro-cytidine
  modified_base 3: mod_base = um
  modified_base 4: mod_base = um
  modified_base 5: mod_base = OTHER; note = 2'O-methyl-adenosine
  modified_base 6: mod_base = OTHER; note = 2' Fluoro-guanosine
  modified_base 7: mod_base = OTHER; note = 2'O-methyl-adenosine
  modified_base 8: mod_base = OTHER; note = 2' Fluoro-guanosine
  modified_base 9: mod_base = OTHER; note = 2' Fluoro-cytidine
  modified_base 10: mod_base = OTHER; note = 2'O-methyl-adenosine
  modified_base 11: mod_base = gm
  modified_base 12: mod_base = OTHER; note = 2'O-methyl-adenosine
  modified_base 13: mod_base = gm
  modified_base 14: mod_base = OTHER; note = 2'Fluoro-adenosine
  modified_base 15: mod_base = cm
  modified_base 16: mod_base = OTHER; note = 2'Fluoro-adenosine
  modified_base 17: mod_base = cm
  modified_base 18: mod_base = cm
  modified_base 19: mod_base = um
  modified_base 20: mod_base = cm
  modified_base 21: mod_base = cm
  modified_base 22: mod_base = OTHER; note = 2'O-methyl-adenosine
  modified_base 23: mod_base = OTHER; note = 2'O-methyl-adenosine
  misc_feature 1^2: note = phosphorothioate linkage
  misc_feature 2^3: note = phosphorothioate linkage
  misc_feature 21^22: note = phosphorothioate linkage
  misc_feature 22^23: note = phosphorothioate linkage
acttagagcagagacacctccaa

SEQ ID NO: 455 - RNA, 23 nt, synthetic construct
  source 1..23: mol_type = other RNA
  misc_feature 1..23: note = Description: B4GALT1 siRNA antisense strands (modified); Antisense strand ID: modified_base; Underlying base sequence: 2
  modified_base 1: mod_base = cm
  modified_base 2: mod_base = OTHER; note = 2'Fluoro-adenosine
  modified_base 3: mod_base = cm
  modified_base 4: mod_base = cm
  modified_base 5: mod_base = um
  modified_base 6: mod_base = OTHER; note = 2' Fluoro-guanosine
  modified_base 7: mod_base = gm
  modified_base 8: mod_base = OTHER; note = 2' Fluoro-guanosine
  modified_base 9: mod_base = OTHER; note = 2' Fluoro-guanosine
  modified_base 10: mod_base = OTHER; note = 2'O-methyl-adenosine
  modified_base 11: mod_base = gm
  modified_base 12: mod_base = gm
  modified_base 13: mod_base = OTHER; note = 2'O-methyl-adenosine
  modified_base 14: mod_base = OTHER; note = 2' Fluoro-guanosine
  modified_base 15: mod_base = OTHER; note = 2'O-methyl-adenosine
  modified_base 16: mod_base = OTHER; note = 2' Fluoro-guanosine
  modified_base 17: mod_base = OTHER; note = 2'O-methyl-adenosine
  modified_base 18: mod_base = cm
  modified_base 19: mod_base = gm
  modified_base 20: mod_base = cm
  modified_base 21: mod_base = OTHER; note = 2'O-methyl-adenosine
  modified_base 22: mod_base = gm
  modified_base 23: mod_base = um
  misc_feature 1^2: note = phosphorothioate linkage
  misc_feature 2^3: note = phosphorothioate linkage
  misc_feature 21^22: note = phosphorothioate linkage
  misc_feature 22^23: note = phosphorothioate linkage
caccttgtgaggagagacgcagt

SEQ ID NO: 456 - RNA, 23 nt, synthetic construct
  source 1..23: mol_type = other RNA
  misc_feature 1..23: note = Description: B4GALT1 siRNA antisense strands (modified); Antisense strand ID: modified_base; Underlying base sequence: 2
  modified_base 1: mod_base = OTHER; note = 2'O-methyl-adenosine
  modified_base 2: mod_base = OTHER; note = 2'Fluoro-adenosine
  modified_base 3: mod_base = OTHER; note = 2'O-methyl-adenosine
  modified_base 4: mod_base = OTHER; note = 2'O-methyl-adenosine
  modified_base 5: mod_base = um
  modified_base 6: mod_base = OTHER; note = 2' Fluoro-guanosine
  modified_base 7: mod_base = um
  modified_base 8: mod_base = OTHER; note = 2' Fluoro-cytidine
  modified_base 9: mod_base = OTHER; note = 2'Fluoro-adenosine
  modified_base 10: mod_base = um
  modified_base 11: mod_base = cm
  modified_base 12: mod_base = OTHER; note = 2'O-methyl-adenosine
  modified_base 13: mod_base = um
  modified_base 14: mod_base = OTHER; note = 2' Fluoro-cytidine
  modified_base 15: mod_base = um
  modified_base 16: mod_base = OTHER; note = 2' Fluoro-guanosine
  modified_base 17: mod_base = cm
  modified_base 18: mod_base = um
  modified_base 19: mod_base = cm
  modified_base 20: mod_base = cm
  modified_base 21: mod_base = um
  modified_base 22: mod_base = cm
  modified_base 23: mod_base = cm
  misc_feature 1^2: note = phosphorothioate linkage
  misc_feature 2^3: note = phosphorothioate linkage
  misc_feature 21^22: note = phosphorothioate linkage
  misc_feature 22^23: note = phosphorothioate linkage
aaaatgtcatcatcttctcctcc

SEQ ID NO: 457 - RNA, 23 nt, synthetic construct
  source 1..23: mol_type = other RNA
  misc_feature 1..23: note = Description: B4GALT1 siRNA antisense strands (modified); Antisense strand ID: modified_base; Underlying base sequence: 2
  modified_base 1: mod_base = cm
  modified_base 2: mod_base = OTHER; note = 2' Fluoro-guanosine
  modified_base 3: mod_base = um
  modified_base 4: mod_base = OTHER; note = 2'O-methyl-adenosine
  modified_base 5: mod_base = gm
  modified_base 6: mod_base = OTHER; note = 2'Fluoro-adenosine
  modified_base 7: mod_base = gm
  modified_base 8: mod_base = OTHER; note = 2' Fluoro-cytidine
  modified_base 9: mod_base = OTHER; note = 2'Fluoro-adenosine
  modified_base 10: mod_base = gm
  modified_base 11: mod_base = OTHER; note = 2'O-methyl-adenosine
  modified_base 12: mod_base = gm
  modified_base 13: mod_base = OTHER; note = 2'O-methyl-adenosine
  modified_base 14: mod_base = OTHER; note = 2' Fluoro-cytidine
  modified_base 15: mod_base = OTHER; note = 2'O-methyl-adenosine
  modified_base 16: mod_base = OTHER; note = 2' Fluoro-cytidine
  modified_base 17: mod_base = cm
  modified_base 18: mod_base = um
  modified_base 19: mod_base = cm
  modified_base 20: mod_base = cm
  modified_base 21: mod_base = OTHER; note = 2'O-methyl-adenosine
  modified_base 22: mod_base = OTHER; note = 2'O-methyl-adenosine
  modified_base 23: mod_base = OTHER; note = 2'O-methyl-adenosine
  misc_feature 1^2: note = phosphorothioate linkage
  misc_feature 2^3: note = phosphorothioate linkage
  misc_feature 21^22: note = phosphorothioate linkage
  misc_feature 22^23: note = phosphorothioate linkage
cttagagcagagacacctccaaa

SEQ ID NO: 458 - RNA, 23 nt, synthetic construct
  source 1..23: mol_type = other RNA
  misc_feature 1..23: note = Description: B4GALT1 siRNA antisense strands (modified); Antisense strand ID: modified_base; Underlying base sequence: 2
  modified_base 1: mod_base = um
  modified_base 2: mod_base = OTHER; note = 2' Fluoro-cytidine
  modified_base 3: mod_base = um
  modified_base 4: mod_base = cm
  modified_base 5: mod_base = cm
  modified_base 6: mod_base = OTHER; note = 2' Fluoro-guanosine
  modified_base 7: mod_base = cm
  modified_base 8: mod_base = OTHER; note = 2' Fluoro-cytidine
  modified_base 9: mod_base = OTHER; note = 2' Fluoro-cytidine
  modified_base 10: mod_base = cm
  modified_base 11: mod_base = OTHER; note = 2'O-methyl-adenosine
  modified_base 12: mod_base = gm
  modified_base 13: mod_base = cm
  modified_base 14: mod_base = OTHER; note = 2' Fluoro-cytidine
  modified_base 15: mod_base = cm
  modified_base 16: mod_base = OTHER; note = 2' Fluoro-cytidine
  modified_base 17: mod_base = OTHER; note = 2'O-methyl-adenosine
  modified_base 18: mod_base = OTHER; note = 2'O-methyl-adenosine
  modified_base 19: mod_base = um
  modified_base 20: mod_base = OTHER; note = 2'O-methyl-adenosine
  modified_base 21: mod_base = OTHER; note = 2'O-methyl-adenosine
  modified_base 22: mod_base = um
  modified_base 23: mod_base = um
  misc_feature 1^2: note = phosphorothioate linkage
  misc_feature 2^3: note = phosphorothioate linkage
  misc_feature 21^22: note = phosphorothioate linkage
  misc_feature 22^23: note = phosphorothioate linkage
tctcctccccagccccaataatt

SEQ ID NO: 459 - RNA, 23 nt, synthetic construct
  source 1..23: mol_type = other RNA
  misc_feature 1..23: note = Description: B4GALT1 siRNA antisense strands (modified); Antisense strand ID: modified_base; Underlying base sequence: 2
  modified_base 1: mod_base = OTHER; note = 2'O-methyl-adenosine
  modified_base 2: mod_base = OTHER; note = 2' Fluoro-guanosine
  modified_base 3: mod_base = gm
  modified_base 4: mod_base = cm
  modified_base 5: mod_base = OTHER; note = 2'O-methyl-adenosine
  modified_base 6: mod_base = OTHER; note = 2' Fluoro-cytidine
  modified_base 7: mod_base = um
  modified_base 8: mod_base = OTHER; note = 2' Fluoro-guanosine
  modified_base 9: mod_base = OTHER; note = 2' Fluoro-guanosine
  modified_base 10: mod_base = gm
  modified_base 11: mod_base = gm
  modified_base 12: mod_base = OTHER; note = 2'O-methyl-adenosine
  modified_base 13: mod_base = OTHER; note = 2'O-methyl-adenosine
  modified_base 14: mod_base = OTHER; note = 2'Fluoro-adenosine
  modified_base 15: mod_base = OTHER; note = 2'O-methyl-adenosine
  modified_base 16: mod_base = OTHER; note = 2' Fluoro-guanosine
  modified_base 17: mod_base = um
  modified_base 18: mod_base = cm
  modified_base 19: mod_base = OTHER; note = 2'O-methyl-adenosine
  modified_base 20: mod_base = gm
  modified_base 21: mod_base = gm
  modified_base 22: mod_base = OTHER; note = 2'O-methyl-adenosine
  modified_base 23: mod_base = um
  misc_feature 1^2: note = phosphorothioate linkage
  misc_feature 2^3: note = phosphorothioate linkage
  misc_feature 21^22: note = phosphorothioate linkage
  misc_feature 22^23: note = phosphorothioate linkage
aggcactttggaaaagtcaggat

SEQ ID NO: 460 - RNA, 23 nt, synthetic construct
  source 1..23: mol_type = other RNA
  misc_feature 1..23: note = Description: B4GALT1 siRNA antisense strands (modified); Antisense strand ID: modified_base; Underlying base sequence: 2
  modified_base 1: mod_base = cm
  modified_base 2: mod_base = OTHER; note = 2' Fluoro-cytidine
  modified_base 3: mod_base = OTHER; note = 2'O-methyl-adenosine
  modified_base 4: mod_base = um
  modified_base 5: mod_base = um
  modified_base 6: mod_base = OTHER; note = 2' Fluoro-guanosine
  modified_base 7: mod_base = cm
  modified_base 8: mod_base = OTHER; note = 2'Fluoro-adenosine
  modified_base 9: mod_base = OTHER; note = 2'Fluoro-adenosine
  modified_base 10: mod_base = cm
  modified_base 11: mod_base = gm
  modified_base 12: mod_base = gm
  modified_base 13: mod_base = OTHER; note = 2'O-methyl-adenosine
  modified_base 14: mod_base = OTHER; note = 2'Fluoro-adenosine
  modified_base 15: mod_base = OTHER; note = 2'O-methyl-adenosine
  modified_base 16: mod_base = OTHER; note = 2' Fluoro-guanosine
  modified_base 17: mod_base = gm
  modified_base 18: mod_base = um
  modified_base 19: mod_base = gm
  modified_base 20: mod_base = cm
  modified_base 21: mod_base = cm
  modified_base 22: mod_base = gm
  modified_base 23: mod_base = um
  misc_feature 1^2: note = phosphorothioate linkage
  misc_feature 2^3: note = phosphorothioate linkage
  misc_feature 21^22: note = phosphorothioate linkage
  misc_feature 22^23: note = phosphorothioate linkage
ccattgcaacggaaatgtgccgt

SEQ ID NO: 461 - RNA, 23 nt, synthetic construct
  source 1..23: mol_type = other RNA
  misc_feature 1..23: note = Description: B4GALT1 siRNA antisense strands (modified); Antisense strand ID: modified_base; Underlying base sequence: 2
  modified_base 1: mod_base = OTHER; note = 2'O-methyl-adenosine
  modified_base 2: mod_base = OTHER; note = 2'Fluoro-adenosine
  modified_base 3: mod_base = cm
  modified_base 4: mod_base = um
  modified_base 5: mod_base = gm
  modified_base 6: mod_base = OTHER; note = 2' Fluoro-guanosine
  modified_base 7: mod_base = um
  modified_base 8: mod_base = OTHER; note = 2' Fluoro-guanosine
  modified_base 9: mod_base = OTHER; note = 2' Fluoro-guanosine
  modified_base 10: mod_base = um
  modified_base 11: mod_base = um
  modified_base 12: mod_base = OTHER; note = 2'O-methyl-adenosine
  modified_base 13: mod_base = cm
  modified_base 14: mod_base = OTHER; note = 2' Fluoro-guanosine
  modified_base 15: mod_base = um
  modified_base 16: mod_base = OTHER; note = 2'Fluoro-adenosine
  modified_base 17: mod_base = gm
  modified_base 18: mod_base = OTHER; note = 2'O-methyl-adenosine
  modified_base 19: mod_base = gm
  modified_base 20: mod_base = cm
  modified_base 21: mod_base = OTHER; note = 2'O-methyl-adenosine
  modified_base 22: mod_base = gm
  modified_base 23: mod_base = OTHER; note = 2'O-methyl-adenosine
  misc_feature 1^2: note = phosphorothioate linkage
  misc_feature 2^3: note = phosphorothioate linkage
  misc_feature 21^22: note = phosphorothioate linkage
  misc_feature 22^23: note = phosphorothioate linkage
aactgttgtttacttagagcaga

SEQ ID NO: 462 - RNA, 23 nt, synthetic construct
  source 1..23: mol_type = other RNA
  misc_feature 1..23: note = Description: B4GALT1 siRNA antisense strands (modified); Antisense strand ID: modified_base; Underlying base sequence: 2
  modified_base 1: mod_base = um
  modified_base 2: mod_base = OTHER; note = 2' Fluoro-guanosine
  modified_base 3: mod_base = OTHER; note = 2'O-methyl-adenosine
  modified_base 4: mod_base = gm
  modified_base 5: mod_base = OTHER; note = 2'O-methyl-adenosine
  modified_base 6: mod_base = OTHER; note = 2' Fluoro-guanosine
  modified_base 7: mod_base = cm
  modified_base 8: mod_base = OTHER; note = 2'Fluoro-adenosine
  modified_base 9: mod_base = OTHER; note = 2' Fluoro-guanosine
  modified_base 10: mod_base = OTHER; note = 2'O-methyl-adenosine
  modified_base 11: mod_base = gm
  modified_base 12: mod_base = OTHER; note = 2'O-methyl-adenosine
  modified_base 13: mod_base = cm
  modified_base 14: mod_base = OTHER; note = 2'Fluoro-adenosine
  modified_base 15: mod_base = cm
  modified_base 16: mod_base = OTHER; note = 2' Fluoro-cytidine
  modified_base 17: mod_base = um
  modified_base 18: mod_base = cm
  modified_base 19: mod_base = cm
  modified_base 20: mod_base = OTHER; note = 2'O-methyl-adenosine
  modified_base 21: mod_base = OTHER; note = 2'O-methyl-adenosine
  modified_base 22: mod_base = OTHER; note = 2'O-methyl-adenosine
  modified_base 23: mod_base = OTHER; note = 2'O-methyl-adenosine
  misc_feature 1^2: note = phosphorothioate linkage
  misc_feature 2^3: note = phosphorothioate linkage
  misc_feature 21^22: note = phosphorothioate linkage
  misc_feature 22^23: note = phosphorothioate linkage
ttagagcagagacacctccaaaa

SEQ ID NO: 463 - RNA, 23 nt, synthetic construct
  source 1..23: mol_type = other RNA
  misc_feature 1..23: note = Description: B4GALT1 siRNA antisense strands (modified); Antisense strand ID: modified_base; Underlying base sequence: 2
  modified_base 1: mod_base = gm
  modified_base 2: mod_base = OTHER; note = 2'Fluoro-adenosine
  modified_base 3: mod_base = OTHER; note = 2'O-methyl-adenosine
  modified_base 4: mod_base = OTHER; note = 2'O-methyl-adenosine
  modified_base 5: mod_base = um
  modified_base 6: mod_base = OTHER; note = 2' Fluoro-guanosine
  modified_base 7: mod_base = cm
  modified_base 8: mod_base = OTHER; note = 2'Fluoro-adenosine
  modified_base 9: mod_base = OTHER; note = 2'Fluoro-adenosine
  modified_base 10: mod_base = gm
  modified_base 11: mod_base = um
  modified_base 12: mod_base = um
  modified_base 13: mod_base = um
  modified_base 14: mod_base = OTHER; note = 2'Fluoro-adenosine
  modified_base 15: mod_base = cm
  modified_base 16: mod_base = OTHER; note = 2'Fluoro-adenosine
  modified_base 17: mod_base = um
  modified_base 18: mod_base = OTHER; note = 2'O-methyl-adenosine
  modified_base 19: mod_base = gm
  modified_base 20: mod_base = cm
  modified_base 21: mod_base = OTHER; note = 2'O-methyl-adenosine
  modified_base 22: mod_base = um
  modified_base 23: mod_base = gm
  misc_feature 1^2: note = phosphorothioate linkage
  misc_feature 2^3: note = phosphorothioate linkage
  misc_feature 21^22: note = phosphorothioate linkage
  misc_feature 22^23: note = phosphorothioate linkage
gaaattcaagtttacatagcatg

SEQ ID NO: 464 - RNA, 23 nt, synthetic construct
  source 1..23: mol_type = other RNA
  misc_feature 1..23: note = Description: B4GALT1 siRNA antisense strands (modified); Antisense strand ID: modified_base; Underlying base sequence: 2
  modified_base 1: mod_base = cm
  modified_base 2: mod_base = OTHER; note = 2'Fluoro-adenosine
  modified_base 3: mod_base = OTHER; note = 2'O-methyl-adenosine
  modified_base 4: mod_base = um
  modified_base 5: mod_base = OTHER; note = 2'O-methyl-adenosine
  modified_base 6: mod_base = OTHER; note = 2'Fluoro-adenosine
  modified_base 7: mod_base = um
  modified_base 8: mod_base = OTHER; note = 2' Fluoro-guanosine
  modified_base 9: mod_base = OTHER; note = 2'Fluoro-adenosine
  modified_base 10: mod_base = um
  modified_base 11: mod_base = um
  modified_base 12: mod_base = OTHER; note = 2'O-methyl-adenosine
  modified_base 13: mod_base = gm
  modified_base 14: mod_base = OTHER; note = 2' Fluoro-guanosine
  modified_base 15: mod_base = OTHER; note = 2'O-methyl-adenosine
  modified_base 16: mod_base = OTHER; note = 2'Fluoro-adenosine
  modified_base 17: mod_base = OTHER; note = 2'O-methyl-adenosine
  modified_base 18: mod_base = um
  modified_base 19: mod_base = cm
  modified_base 20: mod_base = cm
  modified_base 21: mod_base = OTHER; note = 2'O-methyl-adenosine
  modified_base 22: mod_base = um
  modified_base 23: mod_base = um
  misc_feature 1^2: note = phosphorothioate linkage
  misc_feature 2^3: note = phosphorothioate linkage
  misc_feature 21^22: note = phosphorothioate linkage
  misc_feature 22^23: note = phosphorothioate linkage
caataattattaggaaatccatt

SEQ ID NO: 465 - RNA, 23 nt, synthetic construct
  source 1..23: mol_type = other RNA
  misc_feature 1..23: note = Description: B4GALT1 siRNA antisense strands (modified); Antisense strand ID: modified_base; Underlying base sequence: 2
  modified_base 1: mod_base = cm
  modified_base 2: mod_base = OTHER; note = 2' Fluoro-guanosine
  modified_base 3: mod_base = cm
  modified_base 4: mod_base = cm
  modified_base 5: mod_base = um
  modified_base 6: mod_base = OTHER; note = 2' Fluoro-cytidine
  modified_base 7: mod_base = cm
  modified_base 8: mod_base = OTHER; note = 2' Fluoro-cytidine
  modified_base 9: mod_base = OTHER; note = 2' Fluoro-cytidine
  modified_base 10: mod_base = OTHER; note = 2'O-methyl-adenosine
  modified_base 11: mod_base = gm
  modified_base 12: mod_base = cm
  modified_base 13: mod_base = cm
  modified_base 14: mod_base = OTHER; note = 2' Fluoro-cytidine
  modified_base 15: mod_base = cm
  modified_base 16: mod_base = OTHER; note = 2'Fluoro-adenosine
  modified_base 17: mod_base = OTHER; note = 2'O-methyl-adenosine
  modified_base 18: mod_base = um
  modified_base 19: mod_base = OTHER; note = 2'O-methyl-adenosine
  modified_base 20: mod_base = OTHER; note = 2'O-methyl-adenosine
  modified_base 21: mod_base = um
  modified_base 22: mod_base = um
  modified_base 23: mod_base = OTHER; note = 2'O-methyl-adenosine
  misc_feature 1^2: note = phosphorothioate linkage
  misc_feature 2^3: note = phosphorothioate linkage
  misc_feature 21^22: note = phosphorothioate linkage
  misc_feature 22^23: note = phosphorothioate linkage
ctcctccccagccccaataatta

SEQ ID NO: 466 - RNA, 23 nt, synthetic construct
  source 1..23: mol_type = other RNA
  misc_feature 1..23: note = Description: B4GALT1 siRNA antisense strands (modified); Antisense strand ID: modified_base; Underlying base sequence: 2
  modified_base 1: mod_base = um
  modified_base 2: mod_base = OTHER; note = 2' Fluoro-guanosine
  modified_base 3: mod_base = um
  modified_base 4: mod_base = um
  modified_base 5: mod_base = OTHER; note = 2'O-methyl-adenosine
  modified_base 6: mod_base = OTHER; note = 2'Fluoro-adenosine
  modified_base 7: mod_base = gm
  modified_base 8: mod_base = OTHER; note = 2' Fluoro-guanosine
  modified_base 9: mod_base = OTHER; note = 2' Fluoro-cytidine
  modified_base 10: mod_base = OTHER; note = 2'O-methyl-adenosine
  modified_base 11: mod_base = cm
  modified_base 12: mod_base = um
  modified_base 13: mod_base = um
  modified_base 14: mod_base = OTHER; note = 2' Fluoro-guanosine
  modified_base 15: mod_base = gm
  modified_base 16: mod_base = OTHER; note = 2' Fluoro-guanosine
  modified_base 17: mod_base = OTHER; note = 2'O-methyl-adenosine
  modified_base 18: mod_base = OTHER; note = 2'O-methyl-adenosine
  modified_base 19: mod_base = OTHER; note = 2'O-methyl-adenosine
  modified_base 20: mod_base = OTHER; note = 2'O-methyl-adenosine
  modified_base 21: mod_base = gm
  modified_base 22: mod_base = um
  modified_base 23: mod_base = cm
  misc_feature 1^2: note = phosphorothioate linkage
  misc_feature 2^3: note = phosphorothioate linkage
  misc_feature 21^22: note = phosphorothioate linkage
  misc_feature 22^23: note = phosphorothioate linkage
ttttaaggcactttggaaaagtc

SEQ ID NO: 467 - RNA, 23 nt, synthetic construct
  source 1..23: mol_type = other RNA
  misc_feature 1..23: note = Description: B4GALT1 siRNA antisense strands (modified); Antisense strand ID: modified_base; Underlying base sequence: 2
  modified_base 1: mod_base = um
  modified_base 2: mod_base = OTHER; note = 2' Fluoro-guanosine
  modified_base 3: mod_base = cm
  modified_base 4: mod_base = um
  modified_base 5: mod_base = cm
  modified_base 6: mod_base = OTHER; note = 2' Fluoro-cytidine
  modified_base 7: mod_base = um
  modified_base 8: mod_base = OTHER; note = 2' Fluoro-cytidine
  modified_base 9: mod_base = OTHER; note = 2' Fluoro-cytidine
  modified_base 10: mod_base = cm
  modified_base 11: mod_base = cm
  modified_base 12: mod_base = OTHER; note = 2'O-methyl-adenosine
  modified_base 13: mod_base = gm
  modified_base 14: mod_base = OTHER; note = 2' Fluoro-cytidine
  modified_base 15: mod_base = cm
  modified_base 16: mod_base = OTHER; note = 2' Fluoro-cytidine
  modified_base 17: mod_base = cm
  modified_base 18: mod_base = OTHER; note = 2'O-methyl-adenosine
  modified_base 19: mod_base = OTHER; note = 2'O-methyl-adenosine
  modified_base 20: mod_base = um
  modified_base 21: mod_base = OTHER; note = 2'O-methyl-adenosine
  modified_base 22: mod_base = OTHER; note = 2'O-methyl-adenosine
  modified_base 23: mod_base = um
  misc_feature 1^2: note = phosphorothioate linkage
  misc_feature 2^3: note = phosphorothioate linkage
  misc_feature 21^22: note = phosphorothioate linkage
  misc_feature 22^23: note = phosphorothioate linkage
ttctcctccccagccccaataat

SEQ ID NO: 468 - RNA, 23 nt, synthetic construct
  source 1..23: mol_type = other RNA
  misc_feature 1..23: note = Description: B4GALT1 siRNA antisense strands (modified); Antisense strand ID: modified_base; Underlying base sequence: 2
  modified_base 1: mod_base = cm
  modified_base 2: mod_base = OTHER; note = 2' Fluoro-guanosine
  modified_base 3: mod_base = OTHER; note = 2'O-methyl-adenosine
  modified_base 4: mod_base = gm
  modified_base 5: mod_base = cm
  modified_base 6: mod_base = OTHER; note = 2' Fluoro-guanosine
  modified_base 7: mod_base = cm
  modified_base 8: mod_base = OTHER; note = 2' Fluoro-guanosine
  modified_base 9: mod_base = OTHER; note = 2' Fluoro-guanosine
  modified_base 10: mod_base = um
  modified_base 11: mod_base = gm
  modified_base 12: mod_base = um
  modified_base 13: mod_base = cm
  modified_base 14: mod_base = OTHER; note = 2' Fluoro-cytidine
  modified_base 15: mod_base = cm
  modified_base 16: mod_base = OTHER; note = 2' Fluoro-guanosine
  modified_base 17: mod_base = OTHER; note = 2'O-methyl-adenosine
  modified_base 18: mod_base = um
  modified_base 19: mod_base = gm
  modified_base 20: mod_base = um
  modified_base 21: mod_base = cm
  modified_base 22: mod_base = cm
  modified_base 23: mod_base = OTHER; note = 2'O-methyl-adenosine
  misc_feature 1^2: note = phosphorothioate linkage
  misc_feature 2^3: note = phosphorothioate linkage
  misc_feature 21^22: note = phosphorothioate linkage
  misc_feature 22^23: note = phosphorothioate linkage
ctagctcggtgtcccgatgtcca

SEQ ID NO: 469 - RNA, 23 nt, synthetic construct
  source 1..23: mol_type = other RNA
  misc_feature 1..23: note = Description: B4GALT1 siRNA antisense strands (modified); Antisense strand ID: modified_base; Underlying base sequence: 2
  modified_base 1: mod_base = OTHER; note = 2'O-methyl-adenosine
  modified_base 2: mod_base = OTHER; note = 2' Fluoro-guanosine
  modified_base 3: mod_base = OTHER; note = 2'O-methyl-adenosine
  modified_base 4: mod_base = cm
  modified_base 5: mod_base = OTHER; note = 2'O-methyl-adenosine
  modified_base 6: mod_base = OTHER; note = 2' Fluoro-cytidine
  modified_base 7: mod_base = cm
  modified_base 8: mod_base = OTHER; note = 2' Fluoro-guanosine
  modified_base 9: mod_base = OTHER; note = 2' Fluoro-cytidine
  modified_base 10: mod_base = cm
  modified_base 11: mod_base = OTHER; note = 2'O-methyl-adenosine
  modified_base 12: mod_base = OTHER; note = 2'O-methyl-adenosine
  modified_base 13: mod_base = OTHER; note = 2'O-methyl-adenosine
  modified_base 14: mod_base = OTHER; note = 2'Fluoro-adenosine
  modified_base 15: mod_base = um
  modified_base 16: mod_base = OTHER; note = 2'Fluoro-adenosine
  modified_base 17: mod_base = cm
  modified_base 18: mod_base = um
  modified_base 19: mod_base = gm
  modified_base 20: mod_base = OTHER; note = 2'O-methyl-adenosine
  modified_base 21: mod_base = OTHER; note = 2'O-methyl-adenosine
  modified_base 22: mod_base = cm
  modified_base 23: mod_base = OTHER; note = 2'O-methyl-adenosine
  misc_feature 1^2: note = phosphorothioate linkage
  misc_feature 2^3: note = phosphorothioate linkage
  misc_feature 21^22: note = phosphorothioate linkage
  misc_feature 22^23: note = phosphorothioate linkage
agacacctccaaaatactgaaca

SEQ ID NO: 470 - RNA, 23 nt, synthetic construct
  source 1..23: mol_type = other RNA
  misc_feature 1..23: note = Description: B4GALT1 siRNA antisense strands (modified); Antisense strand ID: modified_base; Underlying base sequence: 2
  modified_base 1: mod_base = um
  modified_base 2: mod_base = OTHER; note = 2'Fluoro-adenosine
  modified_base 3: mod_base = cm
  modified_base 4: mod_base = um
  modified_base 5: mod_base = um
  modified_base 6: mod_base = OTHER; note = 2'Fluoro-adenosine
  modified_base 7: mod_base = gm
  modified_base 8: mod_base = OTHER; note = 2'Fluoro-adenosine
  modified_base 9: mod_base = OTHER; note = 2' Fluoro-guanosine
  modified_base 10: mod_base = cm
  modified_base 11: mod_base = OTHER; note = 2'O-methyl-adenosine
  modified_base 12: mod_base = gm
  modified_base 13: mod_base = OTHER; note = 2'O-methyl-adenosine
  modified_base 14: mod_base = OTHER; note = 2' Fluoro-guanosine
  modified_base 15: mod_base = OTHER; note = 2'O-methyl-adenosine
  modified_base 16: mod_base = OTHER; note = 2' Fluoro-cytidine
  modified_base 17: mod_base = OTHER; note = 2'O-methyl-adenosine
  modified_base 18: mod_base = cm
  modified_base 19: mod_base = cm
  modified_base 20: mod_base = um
  modified_base 21: mod_base = cm
  modified_base 22: mod_base = cm
  modified_base 23: mod_base = OTHER; note = 2'O-methyl-adenosine
  misc_feature 1^2: note = phosphorothioate linkage
  misc_feature 2^3: note = phosphorothioate linkage
  misc_feature 21^22: note = phosphorothioate linkage
  misc_feature 22^23: note = phosphorothioate linkage
tacttagagcagagacacctcca

SEQ ID NO: 471 - RNA, 23 nt, synthetic construct
  source 1..23: mol_type = other RNA
  misc_feature 1..23: note = Description: B4GALT1 siRNA antisense strands (modified); Antisense strand ID: modified_base; Underlying base sequence: 2
  modified_base 1: mod_base = um
  modified_base 2: mod_base = OTHER; note = 2'Fluoro-adenosine
  modified_base 3: mod_base = gm
  modified_base 4: mod_base = gm
  modified_base 5: mod_base = um
  modified_base 6: mod_base = OTHER; note = 2' Fluoro-guanosine
  modified_base 7: mod_base = OTHER; note = 2'O-methyl-adenosine
  modified_base 8: mod_base = OTHER; note = 2' Fluoro-guanosine
  modified_base 9: mod_base = OTHER; note = 2' Fluoro-guanosine
  modified_base 10: mod_base = gm
  modified_base 11: mod_base = OTHER; note = 2'O-methyl-adenosine
  modified_base 12: mod_base = gm
  modified_base 13: mod_base = um
  modified_base 14: mod_base = OTHER; note = 2' Fluoro-guanosine
  modified_base 15: mod_base = cm
  modified_base 16: mod_base = OTHER; note = 2'Fluoro-adenosine
  modified_base 17: mod_base = OTHER; note = 2'O-methyl-adenosine
  modified_base 18: mod_base = OTHER; note = 2'O-methyl-adenosine
  modified_base 19: mod_base = cm
  modified_base 20: mod_base = cm
  modified_base 21: mod_base = OTHER; note = 2'O-methyl-adenosine
  modified_base 22: mod_base = um
  modified_base 23: mod_base = cm
  misc_feature 1^2: note = phosphorothioate linkage
  misc_feature 2^3: note = phosphorothioate linkage
  misc_feature 21^22: note = phosphorothioate linkage
  misc_feature 22^23: note = phosphorothioate linkage
taggtgagtgagttcaaaccatc

SEQ ID NO: 472 - RNA, 23 nt, synthetic construct
  source 1..23: mol_type = other RNA
  misc_feature 1..23: note = Description: B4GALT1 siRNA antisense strands (modified); Antisense strand ID: modified_base; Underlying base sequence: 2
  modified_base 1: mod_base = OTHER; note = 2'O-methyl-adenosine
  modified_base 2: mod_base = OTHER; note = 2' Fluoro-cytidine
  modified_base 3: mod_base = um
  modified_base 4: mod_base = um
  modified_base 5: mod_base = um
  modified_base 6: mod_base = OTHER; note = 2'Fluoro-adenosine
  modified_base 7: mod_base = cm
  modified_base 8: mod_base = OTHER; note = 2'Fluoro-adenosine
  modified_base 9: mod_base = OTHER; note = 2' Fluoro-guanosine
  modified_base 10: mod_base = um
  modified_base 11: mod_base = cm
  modified_base 12: mod_base = OTHER; note = 2'O-methyl-adenosine
  modified_base 13: mod_base = gm
  modified_base 14: mod_base = OTHER; note = 2'Fluoro-adenosine
  modified_base 15: mod_base = OTHER; note = 2'O-methyl-adenosine
  modified_base 16: mod_base = OTHER; note = 2'Fluoro-adenosine
  modified_base 17: mod_base = um
  modified_base 18: mod_base = cm
  modified_base 19: mod_base = OTHER; note = 2'O-methyl-adenosine
  modified_base 20: mod_base = gm
  modified_base 21: mod_base = OTHER; note = 2'O-methyl-adenosine
  modified_base 22: mod_base = cm
  modified_base 23: mod_base = OTHER; note = 2'O-methyl-adenosine
  misc_feature 1^2: note = phosphorothioate linkage
  misc_feature 2^3: note = phosphorothioate linkage
  misc_feature 21^22: note = phosphorothioate linkage
  misc_feature 22^23: note = phosphorothioate linkage
actttacattcagaaatcagaca

SEQ ID NO: 473 - RNA, 23 nt, synthetic construct
  source 1..23: mol_type = other RNA
  misc_feature 1..23: note = Description: B4GALT1 siRNA antisense strands (modified); Antisense strand ID: modified_base; Underlying base sequence: 2
  modified_base 1: mod_base = cm
  modified_base 2: mod_base = OTHER; note = 2'Fluoro-adenosine
  modified_base 3: mod_base = um
  modified_base 4: mod_base = OTHER; note = 2'O-methyl-adenosine
  modified_base 5: mod_base = gm
  modified_base 6: mod_base = OTHER; note = 2' Fluoro-guanosine
  modified_base 7: mod_base = OTHER; note = 2'O-methyl-adenosine
  modified_base 8: mod_base = OTHER; note = 2'Fluoro-adenosine
  modified_base 9: mod_base = OTHER; note = 2'Fluoro-adenosine
  modified_base 10: mod_base = um
  modified_base 11: mod_base = um
  modified_base 12: mod_base = cm
  modified_base 13: mod_base = OTHER; note = 2'O-methyl-adenosine
  modified_base 14: mod_base = OTHER; note = 2'Fluoro-adenosine
  modified_base 15: mod_base = gm
  modified_base 16: mod_base = OTHER; note = 2' Fluoro-guanosine
  modified_base 17: mod_base = um
  modified_base 18: mod_base = um
  modified_base 19: mod_base = OTHER; note = 2'O-methyl-adenosine
  modified_base 20: mod_base = cm
  modified_base 21: mod_base = OTHER; note = 2'O-methyl-adenosine
  modified_base 22: mod_base = um
  modified_base 23: mod_base = OTHER; note = 2'O-methyl-adenosine
  misc_feature 1^2: note = phosphorothioate linkage
  misc_feature 2^3: note = phosphorothioate linkage
  misc_feature 21^22: note = phosphorothioate linkage
  misc_feature 22^23: note = phosphorothioate linkage
cataggaaattcaagtttacata

SEQ ID NO: 474 - RNA, 23 nt, synthetic construct
  source 1..23: mol_type = other RNA
  misc_feature 1..23: note = Description: B4GALT1 siRNA antisense strands (modified); Antisense strand ID: modified_base; Underlying base sequence: 2
  modified_base 1: mod_base = gm
  modified_base 2: mod_base = OTHER; note = 2' Fluoro-guanosine
  modified_base 3: mod_base = um
  modified_base 4: mod_base = um
  modified_base 5: mod_base = OTHER; note = 2'O-methyl-adenosine
  modified_base 6: mod_base = OTHER; note = 2' Fluoro-cytidine
  modified_base 7: mod_base = um
  modified_base 8: mod_base = OTHER; note = 2' Fluoro-guanosine
  modified_base 9: mod_base = OTHER; note = 2'Fluoro-adenosine
  modified_base 10: mod_base = gm
  modified_base 11: mod_base = OTHER; note = 2'O-methyl-adenosine
  modified_base 12: mod_base = gm
  modified_base 13: mod_base = cm
  modified_base 14: mod_base = OTHER; note = 2'Fluoro-adenosine
  modified_base 15: mod_base = gm
  modified_base 16: mod_base = OTHER; note = 2'Fluoro-adenosine
  modified_base 17: mod_base = gm
  modified_base 18: mod_base = OTHER; note = 2'O-methyl-adenosine
  modified_base 19: mod_base = cm
  modified_base 20: mod_base = OTHER; note = 2'O-methyl-adenosine
  modified_base 21: mod_base = cm
  modified_base 22: mod_base = cm
  modified_base 23: mod_base = um
  misc_feature 1^2: note = phosphorothioate linkage
  misc_feature 2^3: note = phosphorothioate linkage
  misc_feature 21^22: note = phosphorothioate linkage
  misc_feature 22^23: note = phosphorothioate linkage
gtttacttagagcagagacacct

SEQ ID NO: 475 - RNA, 23 nt, synthetic construct
  source 1..23: mol_type = other RNA
  misc_feature 1..23: note = Description: B4GALT1 siRNA antisense strands (modified); Antisense strand ID: modified_base; Underlying base sequence: 2
  modified_base 1: mod_base = OTHER; note = 2'O-methyl-adenosine
  modified_base 2: mod_base = OTHER; note = 2' Fluoro-cytidine
  modified_base 3: mod_base = cm
  modified_base 4: mod_base = um
  modified_base 5: mod_base = um
  modified_base 6: mod_base = OTHER; note = 2' Fluoro-guanosine
  modified_base 7: mod_base = um
  modified_base 8: mod_base = OTHER; note = 2' Fluoro-guanosine
  modified_base 9: mod_base = OTHER; note = 2'Fluoro-adenosine
  modified_base 10: mod_base = gm
  modified_base 11: mod_base = gm
  modified_base 12: mod_base = OTHER; note = 2'O-methyl-adenosine
  modified_base 13: mod_base = gm
  modified_base 14: mod_base = OTHER; note = 2'Fluoro-adenosine
  modified_base 15: mod_base = gm
  modified_base 16: mod_base = OTHER; note = 2'Fluoro-adenosine
  modified_base 17: mod_base = cm
  modified_base 18: mod_base = gm
  modified_base 19: mod_base = cm
  modified_base 20: mod_base = OTHER; note = 2'O-methyl-adenosine
  modified_base 21: mod_base = gm
  modified_base 22: mod_base = um
  modified_base 23: mod_base = cm
  misc_feature 1^2: note = phosphorothioate linkage
  misc_feature 2^3: note = phosphorothioate linkage
  misc_feature 21^22: note = phosphorothioate linkage
  misc_feature 22^23: note = phosphorothioate linkage
accttgtgaggagagacgcagtc

SEQ ID NO: 476 - RNA, 23 nt, synthetic construct
  source 1..23: mol_type = other RNA
  misc_feature 1..23: note = Description: B4GALT1 siRNA antisense strands (modified); Antisense strand ID: modified_base; Underlying base sequence: 2
  modified_base 1: mod_base = cm
  modified_base 2: mod_base = OTHER; note = 2' Fluoro-cytidine
  modified_base 3: mod_base = um
  modified_base 4: mod_base = cm
  modified_base 5: mod_base = cm
  modified_base 6: mod_base = OTHER; note = 2'Fluoro-adenosine
  modified_base 7: mod_base = OTHER; note = 2'O-methyl-adenosine
  modified_base 8: mod_base = OTHER; note = 2'Fluoro-adenosine
  modified_base 9: mod_base = OTHER; note = 2'Fluoro-adenosine
  modified_base 10: mod_base = um
  modified_base 11: mod_base = OTHER; note = 2'O-methyl-adenosine
  modified_base 12: mod_base = cm
  modified_base 13: mod_base = um
  modified_base 14: mod_base = OTHER; note = 2' Fluoro-guanosine
  modified_base 15: mod_base = OTHER; note = 2'O-methyl-adenosine
  modified_base 16: mod_base = OTHER; note = 2'Fluoro-adenosine
  modified_base 17: mod_base = cm
  modified_base 18: mod_base = OTHER; note = 2'O-methyl-adenosine
  modified_base 19: mod_base = um
  modified_base 20: mod_base = OTHER; note = 2'O-methyl-adenosine
  modified_base 21: mod_base = OTHER; note = 2'O-methyl-adenosine
  modified_base 22: mod_base = gm
  modified_base 23: mod_base = gm
  misc_feature 1^2: note = phosphorothioate linkage
  misc_feature 2^3: note = phosphorothioate linkage
  misc_feature 21^22: note = phosphorothioate linkage
  misc_feature 22^23: note = phosphorothioate linkage
cctccaaaatactgaacataagg

SEQ ID NO: 477 - RNA, 23 nt, synthetic construct
  source 1..23: mol_type = other RNA
  misc_feature 1..23: note = Description: B4GALT1 siRNA antisense strands (modified); Antisense strand ID: modified_base; Underlying base sequence: 2
  modified_base 1: mod_base = gm
  modified_base 2: mod_base = OTHER; note = 2' Fluoro-guanosine
  modified_base 3: mod_base = um
  modified_base 4: mod_base = gm
  modified_base 5: mod_base = um
  modified_base 6: mod_base = OTHER; note = 2' Fluoro-cytidine
  modified_base 7: mod_base = cm
  modified_base 8: mod_base = OTHER; note = 2' Fluoro-cytidine
  modified_base 9: mod_base = OTHER; note = 2' Fluoro-guanosine
  modified_base 10: mod_base = OTHER; note = 2'O-methyl-adenosine
  modified_base 11: mod_base = um
  modified_base 12: mod_base = gm
  modified_base 13: mod_base = um
  modified_base 14: mod_base = OTHER; note = 2' Fluoro-cytidine
  modified_base 15: mod_base = cm
  modified_base 16: mod_base = OTHER; note = 2'Fluoro-adenosine
  modified_base 17: mod_base = cm
  modified_base 18: mod_base = um
  modified_base 19: mod_base = gm
  modified_base 20: mod_base = um
  modified_base 21: mod_base = gm
  modified_base 22: mod_base = OTHER; note = 2'O-methyl-adenosine
  modified_base 23: mod_base = um
  misc_feature 1^2: note = phosphorothioate linkage
  misc_feature 2^3: note = phosphorothioate linkage
  misc_feature 21^22: note = phosphorothioate linkage
  misc_feature 22^23: note = phosphorothioate linkage
ggtgtcccgatgtccactgtgat

SEQ ID NO: 478 - RNA, 23 nt, synthetic construct
  source 1..23: mol_type = other RNA
  misc_feature 1..23: note = Description: B4GALT1 siRNA antisense strands (modified); Antisense strand ID: modified_base; Underlying base sequence: 2
  modified_base 1: mod_base = cm
  modified_base 2: mod_base = OTHER; note = 2' Fluoro-guanosine
  modified_base 3: mod_base = gm
  modified_base 4: mod_base = um
  modified_base 5: mod_base = um
  modified_base 6: mod_base = OTHER; note = 2' Fluoro-guanosine
  modified_base 7: mod_base = um
  modified_base 8: mod_base = OTHER; note = 2' Fluoro-guanosine
  modified_base 9: mod_base = OTHER; note = 2' Fluoro-guanosine
  modified_base 10: mod_base = OTHER; note = 2'O-methyl-adenosine
  modified_base 11: mod_base = cm
  modified_base 12: mod_base = um
  modified_base 13: mod_base = um
  modified_base 14: mod_base = OTHER; note = 2'Fluoro-adenosine
  modified_base 15: mod_base = gm
  modified_base 16: mod_base = OTHER; note = 2'Fluoro-adenosine
  modified_base 17: mod_base = gm
  modified_base 18: mod_base = cm
  modified_base 19: mod_base = OTHER; note = 2'O-methyl-adenosine
  modified_base 20: mod_base = gm
  modified_base 21: mod_base = OTHER; note = 2'O-methyl-adenosine
  modified_base 22: mod_base = gm
  modified_base 23: mod_base = OTHER; note = 2'O-methyl-adenosine
  misc_feature 1^2: note = phosphorothioate linkage
  misc_feature 2^3: note = phosphorothioate linkage
  misc_feature 21^22: note = phosphorothioate linkage
  misc_feature 22^23: note = phosphorothioate linkage
ctgttgtttacttagagcagaga

SEQ ID NO: 479 - RNA, 23 nt, synthetic construct
  source 1..23: mol_type = other RNA
  misc_feature 1..23: note = Description: B4GALT1 siRNA antisense strands (modified); Antisense strand ID: modified_base; Underlying base sequence: 2
  modified_base 1: mod_base = cm
  modified_base 2: mod_base = OTHER; note = 2'Fluoro-adenosine
  modified_base 3: mod_base = um
  modified_base 4: mod_base = um
  modified_base 5: mod_base = gm
  modified_base 6: mod_base = OTHER; note = 2' Fluoro-cytidine
  modified_base 7: mod_base = OTHER; note = 2'O-methyl-adenosine
  modified_base 8: mod_base = OTHER; note = 2'Fluoro-adenosine
  modified_base 9: mod_base = OTHER; note = 2' Fluoro-cytidine
  modified_base 10: mod_base = gm
  modified_base 11: mod_base = gm
  modified_base 12: mod_base = OTHER; note = 2'O-methyl-adenosine
  modified_base 13: mod_base = OTHER; note = 2'O-methyl-adenosine
  modified_base 14: mod_base = OTHER; note = 2'Fluoro-adenosine
  modified_base 15: mod_base = um
  modified_base 16: mod_base = OTHER; note = 2' Fluoro-guanosine
  modified_base 17: mod_base = um
  modified_base 18: mod_base = gm
  modified_base 19: mod_base = cm
  modified_base 20: mod_base = cm
  modified_base 21: mod_base = gm
  modified_base 22: mod_base = um
  modified_base 23: mod_base = gm
  misc_feature 1^2: note = phosphorothioate linkage
  misc_feature 2^3: note = phosphorothioate linkage
  misc_feature 21^22: note = phosphorothioate linkage
  misc_feature 22^23: note = phosphorothioate linkage
cattgcaacggaaatgtgccgtg

SEQ ID NO: 480 - RNA, 23 nt, synthetic construct
  source 1..23: mol_type = other RNA
  misc_feature 1..23: note = Description: B4GALT1 siRNA antisense strands (modified); Antisense strand ID: modified_base; Underlying base sequence: 2
  modified_base 1: mod_base = gm
  modified_base 2: mod_base = OTHER; note = 2'Fluoro-adenosine
  modified_base 3: mod_base = gm
  modified_base 4: mod_base = OTHER; note = 2'O-methyl-adenosine
  modified_base 5: mod_base = cm
  modified_base 6: mod_base = OTHER; note = 2'Fluoro-adenosine
  modified_base 7: mod_base = cm
  modified_base 8: mod_base = OTHER; note = 2' Fluoro-cytidine
  modified_base 9: mod_base = OTHER; note = 2' Fluoro-guanosine
  modified_base 10: mod_base = cm
  modified_base 11: mod_base = cm
  modified_base 12: mod_base = OTHER; note = 2'O-methyl-adenosine
  modified_base 13: mod_base = OTHER; note = 2'O-methyl-adenosine
  modified_base 14: mod_base = OTHER; note = 2'Fluoro-adenosine
  modified_base 15: mod_base = OTHER; note = 2'O-methyl-adenosine
  modified_base 16: mod_base = OTHER; note = 2' Fluoro-guanosine
  modified_base 17: mod_base = OTHER; note = 2'O-methyl-adenosine
  modified_base 18: mod_base = cm
  modified_base 19: mod_base = um
  modified_base 20: mod_base = gm
  modified_base 21: mod_base = OTHER; note = 2'O-methyl-adenosine
  modified_base 22: mod_base = OTHER; note = 2'O-methyl-adenosine
  modified_base 23: mod_base = cm
  misc_feature 1^2: note = phosphorothioate linkage
  misc_feature 2^3: note = phosphorothioate linkage
  misc_feature 21^22: note = phosphorothioate linkage
  misc_feature 22^23: note = phosphorothioate linkage
gagacacctccaaaatactgaac

SEQ ID NO: 481 - RNA, 23 nt, synthetic construct
  source 1..23: mol_type = other RNA
  misc_feature 1..23: note = Description: B4GALT1 siRNA antisense strands (modified); Antisense strand ID: modified_base; Underlying base sequence: 2
  modified_base 1: mod_base = um
  modified_base 2: mod_base = OTHER; note = 2' Fluoro-cytidine
  modified_base 3: mod_base = cm
  modified_base 4: mod_base = OTHER; note = 2'O-methyl-adenosine
  modified_base 5: mod_base = um
  modified_base 6: mod_base = OTHER; note = 2' Fluoro-guanosine
  modified_base 7: mod_base = gm
  modified_base 8: mod_base = OTHER; note = 2' Fluoro-cytidine
  modified_base 9: mod_base = OTHER; note = 2'Fluoro-adenosine
  modified_base 10: mod_base = OTHER; note = 2'O-methyl-adenosine
  modified_base 11: mod_base = cm
  modified_base 12: mod_base = gm
  modified_base 13: mod_base = gm
  modified_base 14: mod_base = OTHER; note = 2'Fluoro-adenosine
  modified_base 15: mod_base = OTHER; note = 2'O-methyl-adenosine
  modified_base 16: mod_base = OTHER; note = 2'Fluoro-adenosine
  modified_base 17: mod_base = um
  modified_base 18: mod_base = gm
  modified_base 19: mod_base = um
  modified_base 20: mod_base = gm
  modified_base 21: mod_base = cm
  modified_base 22: mod_base = cm
  modified_base 23: mod_base = gm
  misc_feature 1^2: note = phosphorothioate linkage
  misc_feature 2^3: note = phosphorothioate linkage
  misc_feature 21^22: note = phosphorothioate linkage
  misc_feature 22^23: note = phosphorothioate linkage
tccattgcaacggaaatgtgccg

SEQ ID NO: 482 - RNA, 23 nt, synthetic construct
  source 1..23: mol_type = other RNA
  misc_feature 1..23: note = Description: B4GALT1 siRNA antisense strands (modified); Antisense strand ID: modified_base; Underlying base sequence: 2
  modified_base 1: mod_base = OTHER; note = 2'O-methyl-adenosine
  modified_base 2: mod_base = OTHER; note = 2'Fluoro-adenosine
  modified_base 3: mod_base = um
  modified_base 4: mod_base = um
  modified_base 5: mod_base = cm
  modified_base 6: mod_base = OTHER; note = 2'Fluoro-adenosine
  modified_base 7: mod_base = OTHER; note = 2'O-methyl-adenosine
  modified_base 8: mod_base = OTHER; note = 2' Fluoro-guanosine
  modified_base 9: mod_base = OTHER; note = 2' Fluoro-guanosine
  modified_base 10: mod_base = um
  modified_base 11: mod_base = um
  modified_base 12: mod_base = OTHER; note = 2'O-methyl-adenosine
  modified_base 13: mod_base = cm
  modified_base 14: mod_base = OTHER; note = 2'Fluoro-adenosine
  modified_base 15: mod_base = um
  modified_base 16: mod_base = OTHER; note = 2'Fluoro-adenosine
  modified_base 17: mod_base = gm
  modified_base 18: mod_base = cm
  modified_base 19: mod_base = OTHER; note = 2'O-methyl-adenosine
  modified_base 20: mod_base = um
  modified_base 21: mod_base = gm
  modified_base 22: mod_base = cm
  modified_base 23: mod_base = cm
  misc_feature 1^2: note = phosphorothioate linkage
  misc_feature 2^3: note = phosphorothioate linkage
  misc_feature 21^22: note = phosphorothioate linkage
  misc_feature 22^23: note = phosphorothioate linkage
aattcaagtttacatagcatgcc

SEQ ID NO: 483 - RNA, 23 nt, synthetic construct
  source 1..23: mol_type = other RNA
  misc_feature 1..23: note = Description: B4GALT1 siRNA antisense strands (modified); Antisense strand ID: modified_base; Underlying base sequence: 2
  modified_base 1: mod_base = um
  modified_base 2: mod_base = OTHER; note = 2' Fluoro-guanosine
  modified_base 3: mod_base = cm
  modified_base 4: mod_base = gm
  modified_base 5: mod_base = gm
  modified_base 6: mod_base = OTHER; note = 2' Fluoro-guanosine
  modified_base 7: mod_base = cm
  modified_base 8: mod_base = OTHER; note = 2'Fluoro-adenosine
  modified_base 9: mod_base = OTHER; note = 2'Fluoro-adenosine
  modified_base 10: mod_base = OTHER; note = 2'O-methyl-adenosine
  modified_base 11: mod_base = cm
  modified_base 12: mod_base = cm
  modified_base 13: mod_base = um
  modified_base 14: mod_base = OTHER; note = 2' Fluoro-cytidine
  modified_base 15: mod_base = um
  modified_base 16: mod_base = OTHER; note = 2' Fluoro-guanosine
  modified_base 17: mod_base = OTHER; note = 2'O-methyl-adenosine
  modified_base 18: mod_base = gm
  modified_base 19: mod_base = gm
  modified_base 20: mod_base = OTHER; note = 2'O-methyl-adenosine
  modified_base 21: mod_base = um
  modified_base 22: mod_base = um
  modified_base 23: mod_base = gm
  misc_feature 1^2: note = phosphorothioate linkage
  misc_feature 2^3: note = phosphorothioate linkage
  misc_feature 21^22: note = phosphorothioate linkage
  misc_feature 22^23: note = phosphorothioate linkage
ttcggtcaaacctctgaggattg

SEQ ID NO: 484 - RNA, 23 nt, synthetic construct
  source 1..23: mol_type = other RNA
  misc_feature 1..23: note = Description: B4GALT1 siRNA antisense strands (modified); Antisense strand ID: modified_base; Underlying base sequence: 2
  modified_base 1: mod_base = gm
  modified_base 2: mod_base = OTHER; note = 2' Fluoro-guanosine
  modified_base 3: mod_base = gm
  modified_base 4: mod_base = um
  modified_base 5: mod_base = cm
  modified_base 6: mod_base = OTHER; note = 2' Fluoro-cytidine
  modified_base 7: mod_base = cm
  modified_base 8: mod_base = OTHER; note = 2' Fluoro-guanosine
  modified_base 9: mod_base = OTHER; note = 2'Fluoro-adenosine
  modified_base 10: mod_base = um
  modified_base 11: mod_base = gm
  modified_base 12: mod_base = um
  modified_base 13: mod_base = cm
  modified_base 14: mod_base = OTHER; note = 2' Fluoro-cytidine
  modified_base 15: mod_base = OTHER; note = 2'O-methyl-adenosine
  modified_base 16: mod_base = OTHER; note = 2' Fluoro-cytidine
  modified_base 17: mod_base = um
  modified_base 18: mod_base = gm
  modified_base 19: mod_base = um
  modified_base 20: mod_base = gm
  modified_base 21: mod_base = OTHER; note = 2'O-methyl-adenosine
  modified_base 22: mod_base = um
  modified_base 23: mod_base = um
  misc_feature 1^2: note = phosphorothioate linkage
  misc_feature 2^3: note = phosphorothioate linkage
  misc_feature 21^22: note = phosphorothioate linkage
  misc_feature 22^23: note = phosphorothioate linkage
gtgtcccgatgtccactgtgatt

SEQ ID NO: 485 - RNA, 23 nt, synthetic construct
  source 1..23: mol_type = other RNA
  misc_feature 1..23: note = Description: B4GALT1 siRNA antisense strands (modified); Antisense strand ID: modified_base; Underlying base sequence: 2
  modified_base 1: mod_base = um
  modified_base 2: mod_base = OTHER; note = 2' Fluoro-cytidine
  modified_base 3: mod_base = cm
  modified_base 4: mod_base = um
  modified_base 5: mod_base = um
  modified_base 6: mod_base = OTHER; note = 2' Fluoro-cytidine
  modified_base 7: mod_base = OTHER; note = 2'O-methyl-adenosine
  modified_base 8: mod_base = OTHER; note = 2'Fluoro-adenosine
  modified_base 9: mod_base = OTHER; note = 2' Fluoro-guanosine
  modified_base 10: mod_base = gm
  modified_base 11: mod_base = cm
  modified_base 12: mod_base = um
  modified_base 13: mod_base = um
  modified_base 14: mod_base = OTHER; note = 2' Fluoro-cytidine
  modified_base 15: mod_base = um
  modified_base 16: mod_base = OTHER; note = 2' Fluoro-guanosine
  modified_base 17: mod_base = gm
  modified_base 18: mod_base = OTHER; note = 2'O-methyl-adenosine
  modified_base 19: mod_base = OTHER; note = 2'O-methyl-adenosine
  modified_base 20: mod_base = OTHER; note = 2'O-methyl-adenosine
  modified_base 21: mod_base = gm
  modified_base 22: mod_base = cm
  modified_base 23: mod_base = cm
  misc_feature 1^2: note = phosphorothioate linkage
  misc_feature 2^3: note = phosphorothioate linkage
  misc_feature 21^22: note = phosphorothioate linkage
  misc_feature 22^23: note = phosphorothioate linkage
tccttcaaggcttcttgaaagcc

SEQ ID NO: 486 - RNA, 23 nt, synthetic construct
  source 1..23: mol_type = other RNA
  misc_feature 1..23: note = Description: B4GALT1 siRNA antisense strands (modified); Antisense strand ID: modified_base; Underlying base sequence: 2
  modified_base 1: mod_base = um
  modified_base 2: mod_base = OTHER; note = 2' Fluoro-guanosine
  modified_base 3: mod_base = OTHER; note = 2'O-methyl-adenosine
  modified_base 4: mod_base = cm
  modified_base 5: mod_base = um
  modified_base 6: mod_base = OTHER; note = 2' Fluoro-guanosine
  modified_base 7: mod_base = OTHER; note = 2'O-methyl-adenosine
  modified_base 8: mod_base = OTHER; note = 2' Fluoro-guanosine
  modified_base 9: mod_base = OTHER; note = 2'Fluoro-adenosine
  modified_base 10: mod_base = gm
  modified_base 11: mod_base = cm
  modified_base 12: mod_base = OTHER; note = 2'O-methyl-adenosine
  modified_base 13: mod_base = gm
  modified_base 14: mod_base = OTHER; note = 2'Fluoro-adenosine
  modified_base 15: mod_base = gm
  modified_base 16: mod_base = OTHER; note = 2'Fluoro-adenosine
  modified_base 17: mod_base = cm
  modified_base 18: mod_base = OTHER; note = 2'O-methyl-adenosine
  modified_base 19: mod_base = cm
  modified_base 20: mod_base = cm
  modified_base 21: mod_base = um
  modified_base 22: mod_base = cm
  modified_base 23: mod_base = cm
  misc_feature 1^2: note = phosphorothioate linkage
  misc_feature 2^3: note = phosphorothioate linkage
  misc_feature 21^22: note = phosphorothioate linkage
  misc_feature 22^23: note = phosphorothioate linkage
ttacttagagcagagacacctcc

SEQ ID NO: 487 - RNA, 23 nt, synthetic construct
  source 1..23: mol_type = other RNA
  misc_feature 1..23: note = Description: B4GALT1 siRNA antisense strands (modified); Antisense strand ID: modified_base; Underlying base sequence: 2
  modified_base 1: mod_base = OTHER; note = 2'O-methyl-adenosine
  modified_base 2: mod_base = OTHER; note = 2' Fluoro-guanosine
  modified_base 3: mod_base = OTHER; note = 2'O-methyl-adenosine
  modified_base 4: mod_base = gm
  modified_base 5: mod_base = cm
  modified_base 6: mod_base = OTHER; note = 2'Fluoro-adenosine
  modified_base 7: mod_base = gm
  modified_base 8: mod_base = OTHER; note = 2'Fluoro-adenosine
  modified_base 9: mod_base = OTHER; note = 2' Fluoro-guanosine
  modified_base 10: mod_base = OTHER; note = 2'O-methyl-adenosine
  modified_base 11: mod_base = cm
  modified_base 12: mod_base = OTHER; note = 2'O-methyl-adenosine
  modified_base 13: mod_base = cm
  modified_base 14: mod_base = OTHER; note = 2' Fluoro-cytidine
  modified_base 15: mod_base = um
  modified_base 16: mod_base = OTHER; note = 2' Fluoro-cytidine
  modified_base 17: mod_base = cm
  modified_base 18: mod_base = OTHER; note = 2'O-methyl-adenosine
  modified_base 19: mod_base = OTHER; note = 2'O-methyl-adenosine
  modified_base 20: mod_base = OTHER; note = 2'O-methyl-adenosine
  modified_base 21: mod_base = OTHER; note = 2'O-methyl-adenosine
  modified_base 22: mod_base = um
  modified_base 23: mod_base = OTHER; note = 2'O-methyl-adenosine
  misc_feature 1^2: note = phosphorothioate linkage
  misc_feature 2^3: note = phosphorothioate linkage
  misc_feature 21^22: note = phosphorothioate linkage
  misc_feature 22^23: note = phosphorothioate linkage
agagcagagacacctccaaaata

SEQ ID NO: 488 - RNA, 23 nt, synthetic construct
  source 1..23: mol_type = other RNA
  misc_feature 1..23: note = Description: B4GALT1 siRNA antisense strands (modified); Antisense strand ID: modified_base; Underlying base sequence: 2
  modified_base 1: mod_base = OTHER; note = 2'O-methyl-adenosine
  modified_base 2: mod_base = OTHER; note = 2'Fluoro-adenosine
  modified_base 3: mod_base = um
  modified_base 4: mod_base = um
  modified_base 5: mod_base = OTHER; note = 2'O-methyl-adenosine
  modified_base 6: mod_base = OTHER; note = 2'Fluoro-adenosine
  modified_base 7: mod_base = OTHER; note = 2'O-methyl-adenosine
  modified_base 8: mod_base = OTHER; note = 2'Fluoro-adenosine
  modified_base 9: mod_base = OTHER; note = 2' Fluoro-guanosine
  modified_base 10: mod_base = gm
  modified_base 11: mod_base = cm
  modified_base 12: mod_base = OTHER; note = 2'O-methyl-adenosine
  modified_base 13: mod_base = cm
  modified_base 14: mod_base = OTHER; note = 2'Fluoro-adenosine
  modified_base 15: mod_base = um
  modified_base 16: mod_base = OTHER; note = 2' Fluoro-guanosine
  modified_base 17: mod_base = cm
  modified_base 18: mod_base = OTHER; note = 2'O-methyl-adenosine
  modified_base 19: mod_base = um
  modified_base 20: mod_base = gm
  modified_base 21: mod_base = cm
  modified_base 22: mod_base = um
  modified_base 23: mod_base = gm
  misc_feature 1^2: note = phosphorothioate linkage
  misc_feature 2^3: note = phosphorothioate linkage
  misc_feature 21^22: note = phosphorothioate linkage
  misc_feature 22^23: note = phosphorothioate linkage
aattaaaaggcacattcatgctg

SEQ ID NO: 489 - RNA, 23 nt, synthetic construct
  source 1..23: mol_type = other RNA
  misc_feature 1..23: note = Description: B4GALT1 siRNA antisense strands (modified); Antisense strand ID: modified_base; Underlying base sequence: 2
  modified_base 1: mod_base = gm
  modified_base 2: mod_base = OTHER; note = 2' Fluoro-cytidine
  modified_base 3: mod_base = um
  modified_base 4: mod_base = OTHER; note = 2'O-methyl-adenosine
  modified_base 5: mod_base = gm
  modified_base 6: mod_base = OTHER; note = 2' Fluoro-cytidine
  modified_base 7: mod_base = um
  modified_base 8: mod_base = OTHER; note = 2' Fluoro-cytidine
  modified_base 9: mod_base = OTHER; note = 2' Fluoro-guanosine
  modified_base 10: mod_base = gm
  modified_base 11: mod_base = um
  modified_base 12: mod_base = gm
  modified_base 13: mod_base = um
  modified_base 14: mod_base = OTHER; note = 2' Fluoro-cytidine
  modified_base 15: mod_base = cm
  modified_base 16: mod_base = OTHER; note = 2' Fluoro-cytidine
  modified_base 17: mod_base = gm
  modified_base 18: mod_base = OTHER; note = 2'O-methyl-adenosine
  modified_base 19: mod_base = um
  modified_base 20: mod_base = gm
  modified_base 21: mod_base = um
  modified_base 22: mod_base = cm
  modified_base 23: mod_base = cm
  misc_feature 1^2: note = phosphorothioate linkage
  misc_feature 2^3: note = phosphorothioate linkage
  misc_feature 21^22: note = phosphorothioate linkage
  misc_feature 22^23: note = phosphorothioate linkage
gctagctcggtgtcccgatgtcc

SEQ ID NO: 490 - RNA, 23 nt, synthetic construct
  source 1..23: mol_type = other RNA
  misc_feature 1..23: note = Description: B4GALT1 siRNA antisense strands (modified); Antisense strand ID: modified_base; Underlying base sequence: 2
  modified_base 1: mod_base = cm
  modified_base 2: mod_base = OTHER; note = 2' Fluoro-cytidine
  modified_base 3: mod_base = um
  modified_base 4: mod_base = um
  modified_base 5: mod_base = gm
  modified_base 6: mod_base = OTHER; note = 2' Fluoro-guanosine
  modified_base 7: mod_base = gm
  modified_base 8: mod_base = OTHER; note = 2'Fluoro-adenosine
  modified_base 9: mod_base = OTHER; note = 2' Fluoro-guanosine
  modified_base 10: mod_base = gm
  modified_base 11: mod_base = OTHER; note = 2'O-methyl-adenosine
  modified_base 12: mod_base = gm
  modified_base 13: mod_base = OTHER; note = 2'O-methyl-adenosine
  modified_base 14: mod_base = OTHER; note = 2' Fluoro-guanosine
  modified_base 15: mod_base = OTHER; note = 2'O-methyl-adenosine
  modified_base 16: mod_base = OTHER; note = 2' Fluoro-cytidine
  modified_base 17: mod_base = gm
  modified_base 18: mod_base = cm
  modified_base 19: mod_base = OTHER; note = 2'O-methyl-adenosine
  modified_base 20: mod_base = gm
  modified_base 21: mod_base = um
  modified_base 22: mod_base = cm
  modified_base 23: mod_base = cm
  misc_feature 1^2: note = phosphorothioate linkage
  misc_feature 2^3: note = phosphorothioate linkage
  misc_feature 21^22: note = phosphorothioate linkage
  misc_feature 22^23: note = phosphorothioate linkage
ccttgtgaggagagacgcagtcc

SEQ ID NO: 491 - RNA, 23 nt, synthetic construct
  source 1..23: mol_type = other RNA
  misc_feature 1..23: note = Description: B4GALT1 siRNA antisense strands (modified); Antisense strand ID: modified_base; Underlying base sequence: 2
  modified_base 1: mod_base = um
  modified_base 2: mod_base = OTHER; note = 2' Fluoro-cytidine
  modified_base 3: mod_base = cm
  modified_base 4: mod_base = OTHER; note = 2'O-methyl-adenosine
  modified_base 5: mod_base = cm
  modified_base 6: mod_base = OTHER; note = 2' Fluoro-guanosine
  modified_base 7: mod_base = gm
  modified_base 8: mod_base = OTHER; note = 2' Fluoro-guanosine
  modified_base 9: mod_base = OTHER; note = 2' Fluoro-guanosine
  modified_base 10: mod_base = OTHER; note = 2'O-methyl-adenosine
  modified_base 11: mod_base = um
  modified_base 12: mod_base = um
  modified_base 13: mod_base = um
  modified_base 14: mod_base = OTHER; note = 2' Fluoro-guanosine
  modified_base 15: mod_base = gm
  modified_base 16: mod_base = OTHER; note = 2' Fluoro-guanosine
  modified_base 17: mod_base = um
  modified_base 18: mod_base = OTHER; note = 2'O-methyl-adenosine
  modified_base 19: mod_base = um
  modified_base 20: mod_base = OTHER; note = 2'O-methyl-adenosine
  modified_base 21: mod_base = cm
  modified_base 22: mod_base = OTHER; note = 2'O-methyl-adenosine
  modified_base 23: mod_base = OTHER; note = 2'O-methyl-adenosine
  misc_feature 1^2: note = phosphorothioate linkage
  misc_feature 2^3: note = phosphorothioate linkage
  misc_feature 21^22: note = phosphorothioate linkage
  misc_feature 22^23: note = phosphorothioate linkage
tccactgtgatttgggtatacaa

SEQ ID NO: 492 - RNA, 23 nt, synthetic construct
  source 1..23: mol_type = other RNA
  misc_feature 1..23: note = Description: B4GALT1 siRNA antisense strands (modified); Antisense strand ID: modified_base; Underlying base sequence: 2
  modified_base 1: mod_base = gm
  modified_base 2: mod_base = OTHER; note = 2' Fluoro-guanosine
  modified_base 3: mod_base = um
  modified_base 4: mod_base = OTHER; note = 2'O-methyl-adenosine
  modified_base 5: mod_base = um
  modified_base 6: mod_base = OTHER; note = 2' Fluoro-cytidine
  modified_base 7: mod_base = um
  modified_base 8: mod_base = OTHER; note = 2' Fluoro-cytidine
  modified_base 9: mod_base = OTHER; note = 2' Fluoro-guanosine
  modified_base 10: mod_base = gm
  modified_base 11: mod_base = um
  modified_base 12: mod_base = OTHER; note = 2'O-methyl-adenosine
  modified_base 13: mod_base = cm
  modified_base 14: mod_base = OTHER; note = 2'Fluoro-adenosine
  modified_base 15: mod_base = um
  modified_base 16: mod_base = OTHER; note = 2' Fluoro-cytidine
  modified_base 17: mod_base = cm
  modified_base 18: mod_base = OTHER; note = 2'O-methyl-adenosine
  modified_base 19: mod_base = gm
  modified_base 20: mod_base = cm
  modified_base 21: mod_base = OTHER; note = 2'O-methyl-adenosine
  modified_base 22: mod_base = cm
  modified_base 23: mod_base = cm
  misc_feature 1^2: note = phosphorothioate linkage
  misc_feature 2^3: note = phosphorothioate linkage
  misc_feature 21^22: note = phosphorothioate linkage
  misc_feature 22^23: note = phosphorothioate linkage
ggtatctctgtacatccagcacc

SEQ ID NO: 493 - RNA, 23 nt, synthetic construct
  source 1..23: mol_type = other RNA
  misc_feature 1..23: note = Description: B4GALT1 siRNA antisense strands (modified); Antisense strand ID: modified_base; Underlying base sequence: 2
  modified_base 1: mod_base = OTHER; note = 2'O-methyl-adenosine
  modified_base 2: mod_base = OTHER; note = 2' Fluoro-guanosine
  modified_base 3: mod_base = OTHER; note = 2'O-methyl-adenosine
  modified_base 4: mod_base = gm
  modified_base 5: mod_base = gm
  modified_base 6: mod_base = OTHER; note = 2'Fluoro-adenosine
  modified_base 7: mod_base = OTHER; note = 2'O-methyl-adenosine
  modified_base 8: mod_base = OTHER; note = 2'Fluoro-adenosine
  modified_base 9: mod_base = OTHER; note = 2' Fluoro-guanosine
  modified_base 10: mod_base = um
  modified_base 11: mod_base = cm
  modified_base 12: mod_base = OTHER; note = 2'O-methyl-adenosine
  modified_base 13: mod_base = OTHER; note = 2'O-methyl-adenosine
  modified_base 14: mod_base = OTHER; note = 2' Fluoro-guanosine
  modified_base 15: mod_base = um
  modified_base 16: mod_base = OTHER; note = 2' Fluoro-guanosine
  modified_base 17: mod_base = um
  modified_base 18: mod_base = OTHER; note = 2'O-methyl-adenosine
  modified_base 19: mod_base = cm
  modified_base 20: mod_base = OTHER; note = 2'O-methyl-adenosine
  modified_base 21: mod_base = um
  modified_base 22: mod_base = OTHER; note = 2'O-methyl-adenosine
  modified_base 23: mod_base = gm
  misc_feature 1^2: note = phosphorothioate linkage
  misc_feature 2^3: note = phosphorothioate linkage
  misc_feature 21^22: note = phosphorothioate linkage
  misc_feature 22^23: note = phosphorothioate linkage
ataggaaattcaagtttacatag

SEQ ID NO: 494 - RNA, 23 nt, synthetic construct
  source 1..23: mol_type = other RNA
  misc_feature 1..23: note = Description: B4GALT1 siRNA antisense strands (modified); Antisense strand ID: modified_base; Underlying base sequence: 2
  modified_base 1: mod_base = cm
  modified_base 2: mod_base = OTHER; note = 2'Fluoro-adenosine
  modified_base 3: mod_base = um
  modified_base 4: mod_base = cm
  modified_base 5: mod_base = um
  modified_base 6: mod_base = OTHER; note = 2' Fluoro-guanosine
  modified_base 7: mod_base = cm
  modified_base 8: mod_base = OTHER; note = 2' Fluoro-guanosine
  modified_base 9: mod_base = OTHER; note = 2' Fluoro-cytidine
  modified_base 10: mod_base = cm
  modified_base 11: mod_base = um
  modified_base 12: mod_base = cm
  modified_base 13: mod_base = cm
  modified_base 14: mod_base = OTHER; note = 2' Fluoro-cytidine
  modified_base 15: mod_base = cm
  modified_base 16: mod_base = OTHER; note = 2'Fluoro-adenosine
  modified_base 17: mod_base = gm
  modified_base 18: mod_base = cm
  modified_base 19: mod_base = cm
  modified_base 20: mod_base = cm
  modified_base 21: mod_base = cm
  modified_base 22: mod_base = OTHER; note = 2'O-methyl-adenosine
  modified_base 23: mod_base = OTHER; note = 2'O-methyl-adenosine
  misc_feature 1^2: note = phosphorothioate linkage
  misc_feature 2^3: note = phosphorothioate linkage
  misc_feature 21^22: note = phosphorothioate linkage
  misc_feature 22^23: note = phosphorothioate linkage
catcttctcctccccagccccaa

SEQ ID NO: 495 - RNA, 23 nt, synthetic construct
  source 1..23: mol_type = other RNA
  misc_feature 1..23: note = Description: B4GALT1 siRNA antisense strands (modified); Antisense strand ID: modified_base; Underlying base sequence: 2
  modified_base 1: mod_base = um
  modified_base 2: mod_base = OTHER; note = 2' Fluoro-guanosine
  modified_base 3: mod_base = um
  modified_base 4: mod_base = um
  modified_base 5: mod_base = gm
  modified_base 6: mod_base = OTHER; note = 2' Fluoro-guanosine
  modified_base 7: mod_base = um
  modified_base 8: mod_base = OTHER; note = 2' Fluoro-guanosine
  modified_base 9: mod_base = OTHER; note = 2'Fluoro-adenosine
  modified_base 10: mod_base = cm
  modified_base 11: mod_base = um
  modified_base 12: mod_base = um
  modified_base 13: mod_base = OTHER; note = 2'O-methyl-adenosine
  modified_base 14: mod_base = OTHER; note = 2' Fluoro-guanosine
  modified_base 15: mod_base = OTHER; note = 2'O-methyl-adenosine
  modified_base 16: mod_base = OTHER; note = 2' Fluoro-guanosine
  modified_base 17: mod_base = cm
  modified_base 18: mod_base = OTHER; note = 2'O-methyl-adenosine
  modified_base 19: mod_base = gm
  modified_base 20: mod_base = OTHER; note = 2'O-methyl-adenosine
  modified_base 21: mod_base = gm
  modified_base 22: mod_base = OTHER; note = 2'O-methyl-adenosine
  modified_base 23: mod_base = cm
  misc_feature 1^2: note = phosphorothioate linkage
  misc_feature 2^3: note = phosphorothioate linkage
  misc_feature 21^22: note = phosphorothioate linkage
  misc_feature 22^23: note = phosphorothioate linkage
tgttgtttacttagagcagagac

SEQ ID NO: 496 - RNA, 23 nt, synthetic construct
  source 1..23: mol_type = other RNA
  misc_feature 1..23: note = Description: B4GALT1 siRNA antisense strands (modified); Antisense strand ID: modified_base; Underlying base sequence: 2
  modified_base 1: mod_base = OTHER; note = 2'O-methyl-adenosine
  modified_base 2: mod_base = OTHER; note = 2' Fluoro-guanosine
  modified_base 3: mod_base = cm
  modified_base 4: mod_base = um
  modified_base 5: mod_base = um
  modified_base 6: mod_base = OTHER; note = 2' Fluoro-cytidine
  modified_base 7: mod_base = um
  modified_base 8: mod_base = OTHER; note = 2' Fluoro-cytidine
  modified_base 9: mod_base = OTHER; note = 2' Fluoro-cytidine
  modified_base 10: mod_base = um
  modified_base 11: mod_base = cm
  modified_base 12: mod_base = cm
  modified_base 13: mod_base = cm
  modified_base 14: mod_base = OTHER; note = 2' Fluoro-cytidine
  modified_base 15: mod_base = OTHER; note = 2'O-methyl-adenosine
  modified_base 16: mod_base = OTHER; note = 2' Fluoro-guanosine
  modified_base 17: mod_base = cm
  modified_base 18: mod_base = cm
  modified_base 19: mod_base = cm
  modified_base 20: mod_base = cm
  modified_base 21: mod_base = OTHER; note = 2'O-methyl-adenosine
  modified_base 22: mod_base = OTHER; note = 2'O-methyl-adenosine
  modified_base 23: mod_base = um
  misc_feature 1^2: note = phosphorothioate linkage
  misc_feature 2^3: note = phosphorothioate linkage
  misc_feature 21^22: note = phosphorothioate linkage
  misc_feature 22^23: note = phosphorothioate linkage
atcttctcctccccagccccaat

SEQ ID NO: 497 - RNA, 23 nt, synthetic construct
  source 1..23: mol_type = other RNA
  misc_feature 1..23: note = Description: B4GALT1 siRNA antisense strands (modified); Antisense strand ID: modified_base; Underlying base sequence: 2
  modified_base 1: mod_base = gm
  modified_base 2: mod_base = OTHER; note = 2' Fluoro-guanosine
  modified_base 3: mod_base = cm
  modified_base 4: mod_base = cm
  modified_base 5: mod_base = cm
  modified_base 6: mod_base = OTHER; note = 2' Fluoro-guanosine
  modified_base 7: mod_base = OTHER; note = 2'O-methyl-adenosine
  modified_base 8: mod_base = OTHER; note = 2' Fluoro-guanosine
  modified_base 9: mod_base = OTHER; note = 2' Fluoro-guanosine
  modified_base 10: mod_base = um
  modified_base 11: mod_base = cm
  modified_base 12: mod_base = cm
  modified_base 13: mod_base = OTHER; note = 2'O-methyl-adenosine
  modified_base 14: mod_base = OTHER; note = 2' Fluoro-cytidine
  modified_base 15: mod_base = um
  modified_base 16: mod_base = OTHER; note = 2' Fluoro-guanosine
  modified_base 17: mod_base = um
  modified_base 18: mod_base = gm
  modified_base 19: mod_base = OTHER; note = 2'O-methyl-adenosine
  modified_base 20: mod_base = um
  modified_base 21: mod_base = um
  modified_base 22: mod_base = um
  modified_base 23: mod_base = gm
  misc_feature 1^2: note = phosphorothioate linkage
  misc_feature 2^3: note = phosphorothioate linkage
  misc_feature 21^22: note = phosphorothioate linkage
  misc_feature 22^23: note = phosphorothioate linkage
gtcccgatgtccactgtgatttg

SEQ ID NO: 498 - RNA, 23 nt, synthetic construct
  source 1..23: mol_type = other RNA
  misc_feature 1..23: note = Description: B4GALT1 siRNA antisense strands (modified); Antisense strand ID: modified_base; Underlying base sequence: 2
  modified_base 1: mod_base = cm
  modified_base 2: mod_base = OTHER; note = 2' Fluoro-guanosine
  modified_base 3: mod_base = cm
  modified_base 4: mod_base = gm
  modified_base 5: mod_base = gm
  modified_base 6: mod_base = OTHER; note = 2' Fluoro-guanosine
  modified_base 7: mod_base = gm
  modified_base 8: mod_base = OTHER; note = 2' Fluoro-guanosine
  modified_base 9: mod_base = OTHER; note = 2' Fluoro-cytidine
  modified_base 10: mod_base = cm
  modified_base 11: mod_base = cm
  modified_base 12: mod_base = gm
  modified_base 13: mod_base = OTHER; note = 2'O-methyl-adenosine
  modified_base 14: mod_base = OTHER; note = 2' Fluoro-guanosine
  modified_base 15: mod_base = gm
  modified_base 16: mod_base = OTHER; note = 2' Fluoro-guanosine
  modified_base 17: mod_base = cm
  modified_base 18: mod_base = cm
  modified_base 19: mod_base = OTHER; note = 2'O-methyl-adenosine
  modified_base 20: mod_base = cm
  modified_base 21: mod_base = um
  modified_base 22: mod_base = gm
  modified_base 23: mod_base = um
  misc_feature 1^2: note = phosphorothioate linkage
  misc_feature 2^3: note = phosphorothioate linkage
  misc_feature 21^22: note = phosphorothioate linkage
  misc_feature 22^23: note = phosphorothioate linkage
ctcggtgtcccgatgtccactgt

SEQ ID NO: 499 - RNA, 23 nt, synthetic construct
  source 1..23: mol_type = other RNA
  misc_feature 1..23: note = Description: B4GALT1 siRNA antisense strands (modified); Antisense strand ID: modified_base; Underlying base sequence: 2
  modified_base 1: mod_base = um
  modified_base 2: mod_base = OTHER; note = 2' Fluoro-cytidine
  modified_base 3: mod_base = cm
  modified_base 4: mod_base = cm
  modified_base 5: mod_base = cm
  modified_base 6: mod_base = OTHER; note = 2'Fluoro-adenosine
  modified_base 7: mod_base = gm
  modified_base 8: mod_base = OTHER; note = 2' Fluoro-cytidine
  modified_base 9: mod_base = OTHER; note = 2' Fluoro-cytidine
  modified_base 10: mod_base = cm
  modified_base 11: mod_base = cm
  modified_base 12: mod_base = OTHER; note = 2'O-methyl-adenosine
  modified_base 13: mod_base = OTHER; note = 2'O-methyl-adenosine
  modified_base 14: mod_base = OTHER; note = 2' Fluoro-guanosine
  modified_base 15: mod_base = OTHER; note = 2'O-methyl-adenosine
  modified_base 16: mod_base = OTHER; note = 2'Fluoro-adenosine
  modified_base 17: mod_base = um
  modified_base 18: mod_base = um
  modified_base 19: mod_base = OTHER; note = 2'O-methyl-adenosine
  modified_base 20: mod_base = um
  modified_base 21: mod_base = um
  modified_base 22: mod_base = OTHER; note = 2'O-methyl-adenosine
  modified_base 23: mod_base = gm
  misc_feature 1^2: note = phosphorothioate linkage
  misc_feature 2^3: note = phosphorothioate linkage
  misc_feature 21^22: note = phosphorothioate linkage
  misc_feature 22^23: note = phosphorothioate linkage
tccccagccccaataattattag

SEQ ID NO: 500 - RNA, 23 nt, synthetic construct
  source 1..23: mol_type = other RNA
  misc_feature 1..23: note = Description: B4GALT1 siRNA antisense strands (modified); Antisense strand ID: modified_base; Underlying base sequence: 2
  modified_base 1: mod_base = OTHER; note = 2'O-methyl-adenosine
  modified_base 2: mod_base = OTHER; note = 2' Fluoro-guanosine
  modified_base 3: mod_base = OTHER; note = 2'O-methyl-adenosine
  modified_base 4: mod_base = gm
  modified_base 5: mod_base = OTHER; note = 2'O-methyl-adenosine
  modified_base 6: mod_base = OTHER; note = 2' Fluoro-cytidine
  modified_base 7: mod_base = OTHER; note = 2'O-methyl-adenosine
  modified_base 8: mod_base = OTHER; note = 2' Fluoro-cytidine
  modified_base 9: mod_base = OTHER; note = 2' Fluoro-cytidine
  modified_base 10: mod_base = um
  modified_base 11: mod_base = cm
  modified_base 12: mod_base = cm
  modified_base 13: mod_base = OTHER; note = 2'O-methyl-adenosine
  modified_base 14: mod_base = OTHER; note = 2'Fluoro-adenosine
  modified_base 15: mod_base = OTHER; note = 2'O-methyl-adenosine
  modified_base 16: mod_base = OTHER; note = 2'Fluoro-adenosine
  modified_base 17: mod_base = um
  modified_base 18: mod_base = OTHER; note = 2'O-methyl-adenosine
  modified_base 19: mod_base = cm
  modified_base 20: mod_base = um
  modified_base 21: mod_base = gm
  modified_base 22: mod_base = OTHER; note = 2'O-methyl-adenosine
  modified_base 23: mod_base = OTHER; note = 2'O-methyl-adenosine
  misc_feature 1^2: note = phosphorothioate linkage
  misc_feature 2^3: note = phosphorothioate linkage
  misc_feature 21^22: note = phosphorothioate linkage
  misc_feature 22^23: note = phosphorothioate linkage
agagacacctccaaaatactgaa

SEQ ID NO: 501 - RNA, 23 nt, synthetic construct
  source 1..23: mol_type = other RNA
  misc_feature 1..23: note = Description: B4GALT1 siRNA antisense strands (modified); Antisense strand ID: modified_base; Underlying base sequence: 2
  modified_base 1: mod_base = gm
  modified_base 2: mod_base = OTHER; note = 2'Fluoro-adenosine
  modified_base 3: mod_base = gm
  modified_base 4: mod_base = cm
  modified_base 5: mod_base = OTHER; note = 2'O-methyl-adenosine
  modified_base 6: mod_base = OTHER; note = 2' Fluoro-guanosine
  modified_base 7: mod_base = OTHER; note = 2'O-methyl-adenosine
  modified_base 8: mod_base = OTHER; note = 2' Fluoro-guanosine
  modified_base 9: mod_base = OTHER; note = 2'Fluoro-adenosine
  modified_base 10: mod_base = cm
  modified_base 11: mod_base = OTHER; note = 2'O-methyl-adenosine
  modified_base 12: mod_base = cm
  modified_base 13: mod_base = cm
  modified_base 14: mod_base = OTHER; note = 2' Fluoro-guanosine
  modified_base 15: mod_base = cm
  modified_base 16: mod_base = OTHER; note = 2' Fluoro-cytidine
  modified_base 17: mod_base = OTHER; note = 2'O-methyl-adenosine
  modified_base 18: mod_base = OTHER; note = 2'O-methyl-adenosine
  modified_base 19: mod_base = OTHER; note = 2'O-methyl-adenosine
  modified_base 20: mod_base = OTHER; note = 2'O-methyl-adenosine
  modified_base 21: mod_base = um
  modified_base 22: mod_base = OTHER; note = 2'O-methyl-adenosine
  modified_base 23: mod_base = cm
  misc_feature 1^2: note = phosphorothioate linkage
  misc_feature 2^3: note = phosphorothioate linkage
  misc_feature 21^22: note = phosphorothioate linkage
  misc_feature 22^23: note = phosphorothioate linkage
gagcagagacacctccaaaatac

SEQ ID NO: 502 - RNA, 23 nt, synthetic construct
  source 1..23: mol_type = other RNA
  misc_feature 1..23: note = Description: B4GALT1 siRNA antisense strands (modified); Antisense strand ID: modified_base; Underlying base sequence: 2
  modified_base 1: mod_base = OTHER; note = 2'O-methyl-adenosine
  modified_base 2: mod_base = OTHER; note = 2' Fluoro-guanosine
  modified_base 3: mod_base = OTHER; note = 2'O-methyl-adenosine
  modified_base 4: mod_base = OTHER; note = 2' Fluoro-cytidine
  modified_base 5: mod_base = OTHER; note = 2'O-methyl-adenosine
  modified_base 6: mod_base = OTHER; note = 2' Fluoro-guanosine
  modified_base 7: mod_base = OTHER; note = 2'O-methyl-adenosine
  modified_base 8: mod_base = gm
  modified_base 9: mod_base = gm
  modified_base 10: mod_base = OTHER; note = 2'O-methyl-adenosine
  modified_base 11: mod_base = OTHER; note = 2'O-methyl-adenosine
  modified_base 12: mod_base = OTHER; note = 2'O-methyl-adenosine
  modified_base 13: mod_base = um
  modified_base 14: mod_base = OTHER; note = 2' Fluoro-guanosine
  modified_base 15: mod_base = cm
  modified_base 16: mod_base = OTHER; note = 2'Fluoro-adenosine
  modified_base 17: mod_base = OTHER; note = 2'O-methyl-adenosine
  modified_base 18: mod_base = gm
  modified_base 19: mod_base = um
  modified_base 20: mod_base = um
  modified_base 21: mod_base = um
  modified_base 22: mod_base = OTHER; note = 2'O-methyl-adenosine
  modified_base 23: mod_base = cm
  misc_feature 1^2: note = phosphorothioate linkage
  misc_feature 2^3: note = phosphorothioate linkage
  misc_feature 21^22: note = phosphorothioate linkage
  misc_feature 22^23: note = phosphorothioate linkage
atacataggaaattcaagtttac

SEQ ID NO: 503 - RNA, 23 nt, synthetic construct
  source 1..23: mol_type = other RNA
  misc_feature 1..23: note = Description: B4GALT1 siRNA antisense strands (modified); Antisense strand ID: modified_base; Underlying base sequence: 2
  modified_base 1: mod_base = OTHER; note = 2'O-methyl-adenosine
  modified_base 2: mod_base = OTHER; note = 2' Fluoro-guanosine
  modified_base 3: mod_base = OTHER; note = 2'O-methyl-adenosine
  modified_base 4: mod_base = cm
  modified_base 5: mod_base = OTHER; note = 2'O-methyl-adenosine
  modified_base 6: mod_base = OTHER; note = 2' Fluoro-guanosine
  modified_base 7: mod_base = OTHER; note = 2'O-methyl-adenosine
  modified_base 8: mod_base = gm
  modified_base 9: mod_base = OTHER; note = 2' Fluoro-guanosine
  modified_base 10: mod_base = OTHER; note = 2'O-methyl-adenosine
  modified_base 11: mod_base = OTHER; note = 2'O-methyl-adenosine
  modified_base 12: mod_base = OTHER; note = 2'O-methyl-adenosine
  modified_base 13: mod_base = um
  modified_base 14: mod_base = OTHER; note = 2' Fluoro-guanosine
  modified_base 15: mod_base = cm
  modified_base 16: mod_base = OTHER; note = 2'Fluoro-adenosine
  modified_base 17: mod_base = OTHER; note = 2'O-methyl-adenosine
  modified_base 18: mod_base = gm
  modified_base 19: mod_base = um
  modified_base 20: mod_base = um
  modified_base 21: mod_base = um
  modified_base 22: mod_base = OTHER; note = 2'O-methyl-adenosine
  modified_base 23: mod_base = cm
  misc_feature 1^2: note = phosphorothioate linkage
  misc_feature 2^3: note = phosphorothioate linkage
  misc_feature 21^22: note = phosphorothioate linkage
  misc_feature 22^23: note = phosphorothioate linkage
atacataggaaattcaagtttac

SEQ ID NO: 504 - RNA, 23 nt, synthetic construct
  source 1..23: mol_type = other RNA
  misc_feature 1..23: note = Description: B4GALT1 siRNA antisense strands (modified); Antisense strand ID: modified_base; Underlying base sequence: 2
  modified_base 1: mod_base = OTHER; note = 2'O-methyl-adenosine
  modified_base 2: mod_base = OTHER; note = 2'Fluoro-adenosine
  modified_base 3: mod_base = OTHER; note = 2'O-methyl-adenosine
  modified_base 4: mod_base = OTHER; note = 2'Fluoro-adenosine
  modified_base 5: mod_base = um
  modified_base 6: mod_base = OTHER; note = 2'Fluoro-adenosine
  modified_base 7: mod_base = cm
  modified_base 8: mod_base = OTHER; note = 2'O-methyl-adenosine
  modified_base 9: mod_base = um
  modified_base 10: mod_base = OTHER; note = 2'O-methyl-adenosine
  modified_base 11: mod_base = gm
  modified_base 12: mod_base = gm
  modified_base 13: mod_base = OTHER; note = 2'O-methyl-adenosine
  modified_base 14: mod_base = OTHER; note = 2'Fluoro-adenosine
  modified_base 15: mod_base = OTHER; note = 2'O-methyl-adenosine
  modified_base 16: mod_base = OTHER; note = 2' Fluoro-guanosine
  modified_base 17: mod_base = um
  modified_base 18: mod_base = cm
  modified_base 19: mod_base = OTHER; note = 2'O-methyl-adenosine
  modified_base 20: mod_base = OTHER; note = 2'O-methyl-adenosine
  modified_base 21: mod_base = gm
  modified_base 22: mod_base = um
  modified_base 23: mod_base = um
  misc_feature 1^2: note = phosphorothioate linkage
  misc_feature 2^3: note = phosphorothioate linkage
  misc_feature 21^22: note = phosphorothioate linkage
  misc_feature 22^23: note = phosphorothioate linkage
aaaatacataggaaattcaagtt

SEQ ID NO: 505 - RNA, 23 nt, synthetic construct
  source 1..23: mol_type = other RNA
  misc_feature 1..23: note = Description: B4GALT1 siRNA antisense strands (modified); Antisense strand ID: modified_base; Underlying base sequence: 2
  modified_base 1: mod_base = OTHER; note = 2'O-methyl-adenosine
  modified_base 2: mod_base = OTHER; note = 2'Fluoro-adenosine
  modified_base 3: mod_base = OTHER; note = 2'O-methyl-adenosine
  modified_base 4: mod_base = OTHER; note = 2'O-methyl-adenosine
  modified_base 5: mod_base = um
  modified_base 6: mod_base = OTHER; note = 2'Fluoro-adenosine
  modified_base 7: mod_base = cm
  modified_base 8: mod_base = OTHER; note = 2'O-methyl-adenosine
  modified_base 9: mod_base = OTHER; note = 2' Fluoro-guanosine
  modified_base 10: mod_base = OTHER; note = 2'O-methyl-adenosine
  modified_base 11: mod_base = gm
  modified_base 12: mod_base = gm
  modified_base 13: mod_base = OTHER; note = 2'O-methyl-adenosine
  modified_base 14: mod_base = OTHER; note = 2'Fluoro-adenosine
  modified_base 15: mod_base = OTHER; note = 2'O-methyl-adenosine
  modified_base 16: mod_base = OTHER; note = 2' Fluoro-guanosine
  modified_base 17: mod_base = um
  modified_base 18: mod_base = cm
  modified_base 19: mod_base = OTHER; note = 2'O-methyl-adenosine
  modified_base 20: mod_base = OTHER; note = 2'O-methyl-adenosine
  modified_base 21: mod_base = gm
  modified_base 22: mod_base = um
  modified_base 23: mod_base = um
  misc_feature 1^2: note = phosphorothioate linkage
  misc_feature 2^3: note = phosphorothioate linkage
  misc_feature 21^22: note = phosphorothioate linkage
  misc_feature 22^23: note = phosphorothioate linkage
aaaatacataggaaattcaagtt

SEQ ID NO: 506 - RNA, 23 nt, synthetic construct
  source 1..23: mol_type = other RNA
  misc_feature 1..23: note = Description: B4GALT1 siRNA antisense strands (modified); Antisense strand ID: modified_base; Underlying base sequence: 2
  modified_base 1: mod_base = um
  modified_base 2: mod_base = OTHER; note = 2' Fluoro-guanosine
  modified_base 3: mod_base = um
  modified_base 4: mod_base = OTHER; note = 2' Fluoro-guanosine
  modified_base 5: mod_base = OTHER; note = 2'O-methyl-adenosine
  modified_base 6: mod_base = OTHER; note = 2'Fluoro-adenosine
  modified_base 7: mod_base = gm
  modified_base 8: mod_base = gm
  modified_base 9: mod_base = cm
  modified_base 10: mod_base = OTHER; note = 2'O-methyl-adenosine
  modified_base 11: mod_base = cm
  modified_base 12: mod_base = um
  modified_base 13: mod_base = um
  modified_base 14: mod_base = OTHER; note = 2' Fluoro-guanosine
  modified_base 15: mod_base = gm
  modified_base 16: mod_base = OTHER; note = 2' Fluoro-guanosine
  modified_base 17: mod_base = OTHER; note = 2'O-methyl-adenosine
  modified_base 18: mod_base = OTHER; note = 2'O-methyl-adenosine
  modified_base 19: mod_base = OTHER; note = 2'O-methyl-adenosine
  modified_base 20: mod_base = OTHER; note = 2'O-methyl-adenosine
  modified_base 21: mod_base = gm
  modified_base 22: mod_base = um
  modified_base 23: mod_base = cm
  misc_feature 1^2: note = phosphorothioate linkage
  misc_feature 2^3: note = phosphorothioate linkage
  misc_feature 21^22: note = phosphorothioate linkage
  misc_feature 22^23: note = phosphorothioate linkage
ttttaaggcactttggaaaagtc

SEQ ID NO: 507 - RNA, 23 nt, synthetic construct
  source 1..23: mol_type = other RNA
  misc_feature 1..23: note = Description: B4GALT1 siRNA antisense strands (modified); Antisense strand ID: modified_base; Underlying base sequence: 2
  modified_base 1: mod_base = um
  modified_base 2: mod_base = OTHER; note = 2' Fluoro-guanosine
  modified_base 3: mod_base = um
  modified_base 4: mod_base = um
  modified_base 5: mod_base = OTHER; note = 2'O-methyl-adenosine
  modified_base 6: mod_base = OTHER; note = 2'Fluoro-adenosine
  modified_base 7: mod_base = gm
  modified_base 8: mod_base = gm
  modified_base 9: mod_base = OTHER; note = 2' Fluoro-cytidine
  modified_base 10: mod_base = OTHER; note = 2'O-methyl-adenosine
  modified_base 11: mod_base = cm
  modified_base 12: mod_base = um
  modified_base 13: mod_base = um
  modified_base 14: mod_base = OTHER; note = 2' Fluoro-guanosine
  modified_base 15: mod_base = gm
  modified_base 16: mod_base = OTHER; note = 2' Fluoro-guanosine
  modified_base 17: mod_base = OTHER; note = 2'O-methyl-adenosine
  modified_base 18: mod_base = OTHER; note = 2'O-methyl-adenosine
  modified_base 19: mod_base = OTHER; note = 2'O-methyl-adenosine
  modified_base 20: mod_base = OTHER; note = 2'O-methyl-adenosine
  modified_base 21: mod_base = gm
  modified_base 22: mod_base = um
  modified_base 23: mod_base = cm
  misc_feature 1^2: note = phosphorothioate linkage
  misc_feature 2^3: note = phosphorothioate linkage
  misc_feature 21^22: note = phosphorothioate linkage
  misc_feature 22^23: note = phosphorothioate linkage
ttttaaggcactttggaaaagtc

SEQ ID NO: 508 - RNA, 23 nt, synthetic construct
  source 1..23: mol_type = other RNA
  misc_feature 1..23: note = Description: B4GALT1 siRNA antisense strands (modified); Antisense strand ID: modified_base; Underlying base sequence: 2
  modified_base 1: mod_base = OTHER; note = 2'O-methyl-adenosine
  modified_base 2: mod_base = OTHER; note = 2' Fluoro-guanosine
  modified_base 3: mod_base = OTHER; note = 2'O-methyl-adenosine
  modified_base 4: mod_base = OTHER; note = 2' Fluoro-guanosine
  modified_base 5: mod_base = OTHER; note = 2'O-methyl-adenosine
  modified_base 6: mod_base = OTHER; note = 2' Fluoro-cytidine
  modified_base 7: mod_base = OTHER; note = 2'O-methyl-adenosine
  modified_base 8: mod_base = cm
  modified_base 9: mod_base = cm
  modified_base 10: mod_base = um
  modified_base 11: mod_base = cm
  modified_base 12: mod_base = cm
  modified_base 13: mod_base = OTHER; note = 2'O-methyl-adenosine
  modified_base 14: mod_base = OTHER; note = 2'Fluoro-adenosine
  modified_base 15: mod_base = OTHER; note = 2'O-methyl-adenosine
  modified_base 16: mod_base = OTHER; note = 2'Fluoro-adenosine
  modified_base 17: mod_base = um
  modified_base 18: mod_base = OTHER; note = 2'O-methyl-adenosine
  modified_base 19: mod_base = cm
  modified_base 20: mod_base = um
  modified_base 21: mod_base = gm
  modified_base 22: mod_base = OTHER; note = 2'O-methyl-adenosine
  modified_base 23: mod_base = OTHER; note = 2'O-methyl-adenosine
  misc_feature 1^2: note = phosphorothioate linkage
  misc_feature 2^3: note = phosphorothioate linkage
  misc_feature 21^22: note = phosphorothioate linkage
  misc_feature 22^23: note = phosphorothioate linkage
agagacacctccaaaatactgaa

SEQ ID NO: 509 - RNA, 23 nt, synthetic construct
  source 1..23: mol_type = other RNA
  misc_feature 1..23: note = Description: B4GALT1 siRNA antisense strands (modified); Antisense strand ID: modified_base; Underlying base sequence: 2
  modified_base 1: mod_base = OTHER; note = 2'O-methyl-adenosine
  modified_base 2: mod_base = OTHER; note = 2' Fluoro-guanosine
  modified_base 3: mod_base = OTHER; note = 2'O-methyl-adenosine
  modified_base 4: mod_base = gm
  modified_base 5: mod_base = OTHER; note = 2'O-methyl-adenosine
  modified_base 6: mod_base = OTHER; note = 2' Fluoro-cytidine
  modified_base 7: mod_base = OTHER; note = 2'O-methyl-adenosine
  modified_base 8: mod_base = cm
  modified_base 9: mod_base = OTHER; note = 2' Fluoro-cytidine
  modified_base 10: mod_base = um
  modified_base 11: mod_base = cm
  modified_base 12: mod_base = cm
  modified_base 13: mod_base = OTHER; note = 2'O-methyl-adenosine
  modified_base 14: mod_base = OTHER; note = 2'Fluoro-adenosine
  modified_base 15: mod_base = OTHER; note = 2'O-methyl-adenosine
  modified_base 16: mod_base = OTHER; note = 2'Fluoro-adenosine
  modified_base 17: mod_base = um
  modified_base 18: mod_base = OTHER; note = 2'O-methyl-adenosine
  modified_base 19: mod_base = cm
  modified_base 20: mod_base = um
  modified_base 21: mod_base = gm
  modified_base 22: mod_base = OTHER; note = 2'O-methyl-adenosine
  modified_base 23: mod_base = OTHER; note = 2'O-methyl-adenosine
  misc_feature 1^2: note = phosphorothioate linkage
  misc_feature 2^3: note = phosphorothioate linkage
  misc_feature 21^22: note = phosphorothioate linkage
  misc_feature 22^23: note = phosphorothioate linkage
agagacacctccaaaatactgaa

SEQ ID NO: 510 - RNA, 23 nt, synthetic construct
  source 1..23: mol_type = other RNA
  misc_feature 1..23: note = Description: B4GALT1 siRNA antisense strands (modified); Antisense strand ID: modified_base; Underlying base sequence: 2
  modified_base 1: mod_base = OTHER; note = 2'O-methyl-adenosine
  modified_base 2: mod_base = OTHER; note = 2' Fluoro-guanosine
  modified_base 3: mod_base = OTHER; note = 2'O-methyl-adenosine
  modified_base 4: mod_base = cm
  modified_base 5: mod_base = OTHER; note = 2'O-methyl-adenosine
  modified_base 6: mod_base = OTHER; note = 2' Fluoro-guanosine
  modified_base 7: mod_base = OTHER; note = 2'O-methyl-adenosine
  modified_base 8: mod_base = gm
  modified_base 9: mod_base = gm
  modified_base 10: mod_base = OTHER; note = 2'O-methyl-adenosine
  modified_base 11: mod_base = OTHER; note = 2'O-methyl-adenosine
  modified_base 12: mod_base = OTHER; note = 2'O-methyl-adenosine
  modified_base 13: mod_base = um
  modified_base 14: mod_base = OTHER; note = 2' Fluoro-guanosine
  modified_base 15: mod_base = cm
  modified_base 16: mod_base = OTHER; note = 2'Fluoro-adenosine
  modified_base 17: mod_base = OTHER; note = 2'O-methyl-adenosine
  modified_base 18: mod_base = OTHER; note = 2' Fluoro-guanosine
  modified_base 19: mod_base = um
  modified_base 20: mod_base = um
  modified_base 21: mod_base = um
  modified_base 22: mod_base = OTHER; note = 2'O-methyl-adenosine
  modified_base 23: mod_base = cm
  misc_feature 1^2: note = phosphorothioate linkage
  misc_feature 2^3: note = phosphorothioate linkage
  misc_feature 21^22: note = phosphorothioate linkage
  misc_feature 22^23: note = phosphorothioate linkage
atacataggaaattcaagtttac

SEQ ID NO: 511 - RNA, 23 nt, synthetic construct
  source 1..23: mol_type = other RNA
  misc_feature 1..23: note = Description: B4GALT1 siRNA antisense strands (modified); Antisense strand ID: modified_base; Underlying base sequence: 2
  modified_base 1: mod_base = OTHER; note = 2'O-methyl-adenosine
  modified_base 2: mod_base = OTHER; note = 2'Fluoro-adenosine
  modified_base 3: mod_base = OTHER; note = 2'O-methyl-adenosine
  modified_base 4: mod_base = OTHER; note = 2'O-methyl-adenosine
  modified_base 5: mod_base = um
  modified_base 6: mod_base = OTHER; note = 2'Fluoro-adenosine
  modified_base 7: mod_base = cm
  modified_base 8: mod_base = OTHER; note = 2'O-methyl-adenosine
  modified_base 9: mod_base = um
  modified_base 10: mod_base = OTHER; note = 2'O-methyl-adenosine
  modified_base 11: mod_base = gm
  modified_base 12: mod_base = gm
  modified_base 13: mod_base = OTHER; note = 2'O-methyl-adenosine
  modified_base 14: mod_base = OTHER; note = 2'Fluoro-adenosine
  modified_base 15: mod_base = OTHER; note = 2'O-methyl-adenosine
  modified_base 16: mod_base = OTHER; note = 2' Fluoro-guanosine
  modified_base 17: mod_base = um
  modified_base 18: mod_base = OTHER; note = 2' Fluoro-cytidine
  modified_base 19: mod_base = OTHER; note = 2'O-methyl-adenosine
  modified_base 20: mod_base = OTHER; note = 2'O-methyl-adenosine
  modified_base 21: mod_base = gm
  modified_base 22: mod_base = um
  modified_base 23: mod_base = um
  misc_feature 1^2: note = phosphorothioate linkage
  misc_feature 2^3: note = phosphorothioate linkage
  misc_feature 21^22: note = phosphorothioate linkage
  misc_feature 22^23: note = phosphorothioate linkage
aaaatacataggaaattcaagtt

SEQ ID NO: 512 - RNA, 23 nt, synthetic construct
  source 1..23: mol_type = other RNA
  misc_feature 1..23: note = Description: B4GALT1 siRNA antisense strands (modified); Antisense strand ID: modified_base; Underlying base sequence: 2
  modified_base 1: mod_base = um
  modified_base 2: mod_base = OTHER; note = 2' Fluoro-guanosine
  modified_base 3: mod_base = um
  modified_base 4: mod_base = um
  modified_base 5: mod_base = OTHER; note = 2'O-methyl-adenosine
  modified_base 6: mod_base = OTHER; note = 2'Fluoro-adenosine
  modified_base 7: mod_base = gm
  modified_base 8: mod_base = gm
  modified_base 9: mod_base = cm
  modified_base 10: mod_base = OTHER; note = 2'O-methyl-adenosine
  modified_base 11: mod_base = cm
  modified_base 12: mod_base = um
  modified_base 13: mod_base = um
  modified_base 14: mod_base = OTHER; note = 2' Fluoro-guanosine
  modified_base 15: mod_base = gm
  modified_base 16: mod_base = OTHER; note = 2' Fluoro-guanosine
  modified_base 17: mod_base = OTHER; note = 2'O-methyl-adenosine
  modified_base 18: mod_base = OTHER; note = 2'Fluoro-adenosine
  modified_base 19: mod_base = OTHER; note = 2'O-methyl-adenosine
  modified_base 20: mod_base = OTHER; note = 2'O-methyl-adenosine
  modified_base 21: mod_base = gm
  modified_base 22: mod_base = um
  modified_base 23: mod_base = cm
  misc_feature 1^2: note = phosphorothioate linkage
  misc_feature 2^3: note = phosphorothioate linkage
  misc_feature 21^22: note = phosphorothioate linkage
  misc_feature 22^23: note = phosphorothioate linkage
ttttaaggcactttggaaaagtc

SEQ ID NO: 513 - RNA, 23 nt, synthetic construct
  source 1..23: mol_type = other RNA
  misc_feature 1..23: note = Description: B4GALT1 siRNA antisense strands (modified); Antisense strand ID: modified_base; Underlying base sequence: 2
  modified_base 1: mod_base = OTHER; note = 2'O-methyl-adenosine
  modified_base 2: mod_base = OTHER; note = 2' Fluoro-guanosine
  modified_base 3: mod_base = OTHER; note = 2'O-methyl-adenosine
  modified_base 4: mod_base = gm
  modified_base 5: mod_base = OTHER; note = 2'O-methyl-adenosine
  modified_base 6: mod_base = OTHER; note = 2' Fluoro-cytidine
  modified_base 7: mod_base = OTHER; note = 2'O-methyl-adenosine
  modified_base 8: mod_base = cm
  modified_base 9: mod_base = cm
  modified_base 10: mod_base = um
  modified_base 11: mod_base = cm
  modified_base 12: mod_base = cm
  modified_base 13: mod_base = OTHER; note = 2'O-methyl-adenosine
  modified_base 14: mod_base = OTHER; note = 2'Fluoro-adenosine
  modified_base 15: mod_base = OTHER; note = 2'O-methyl-adenosine
  modified_base 16: mod_base = OTHER; note = 2'Fluoro-adenosine
  modified_base 17: mod_base = um
  modified_base 18: mod_base = OTHER; note = 2'Fluoro-adenosine
  modified_base 19: mod_base = cm
  modified_base 20: mod_base = um
  modified_base 21: mod_base = gm
  modified_base 22: mod_base = OTHER; note = 2'O-methyl-adenosine
  modified_base 23: mod_base = OTHER; note = 2'O-methyl-adenosine
  misc_feature 1^2: note = phosphorothioate linkage
  misc_feature 2^3: note = phosphorothioate linkage
  misc_feature 21^22: note = phosphorothioate linkage
  misc_feature 22^23: note = phosphorothioate linkage
agagacacctccaaaatactgaa

SEQ ID NO: 514 - RNA, 21 nt, synthetic construct
  source 1..21: mol_type = other RNA
  misc_feature 1..21: note = Description: B4GALT1 siRNA sense strands (modified); Sense strand ID: ETXS1045; Underlying Base Sequence: SEQ ID NO: 305
  modified_base 1: mod_base = cm
  modified_base 2: mod_base = um
  modified_base 3: mod_base = um
  modified_base 4: mod_base = gm
  modified_base 5: mod_base = OTHER; note = 2'O-methyl-adenosine
  modified_base 6: mod_base = OTHER; note = 2'O-methyl-adenosine
  modified_base 7: mod_base = OTHER; note = 2' Fluoro-guanosine
  modified_base 8: mod_base = um
  modified_base 9: mod_base = OTHER; note = 2' Fluoro-guanosine
  modified_base 10: mod_base = OTHER; note = 2' Fluoro-cytidine
  modified_base 11: mod_base = OTHER; note = 2' Fluoro-cytidine
  modified_base 12: mod_base = um
  modified_base 13: mod_base = OTHER; note = 2'O-methyl-adenosine
  modified_base 14: mod_base = um
  modified_base 15: mod_base = gm
  modified_base 16: mod_base = um
  modified_base 17: mod_base = OTHER; note = 2'O-methyl-adenosine
  modified_base 18: mod_base = um
  modified_base 19: mod_base = um
  modified_base 20: mod_base = um
  modified_base 21: mod_base = um
  misc_feature 1^2: note = phosphorothioate linkage
  misc_feature 2^3: note = phosphorothioate linkage
cttgaatttcctatgtatttt

SEQ ID NO: 515 - RNA, 21 nt, synthetic construct
  source 1..21: mol_type = other RNA
  misc_feature 1..21: note = Description: B4GALT1 siRNA sense strands (modified); Sense strand ID: ETXS1047; Underlying Base Sequence: SEQ ID NO: 359
  modified_base 1: mod_base = gm
  modified_base 2: mod_base = um
  modified_base 3: mod_base = gm
  modified_base 4: mod_base = cm
  modified_base 5: mod_base = um
  modified_base 6: mod_base = gm
  modified_base 7: mod_base = OTHER; note = 2' Fluoro-guanosine
  modified_base 8: mod_base = OTHER; note = 2'O-methyl-adenosine
  modified_base 9: mod_base = OTHER; note = 2' Fluoro-guanosine
  modified_base 10: mod_base = OTHER; note = 2' Fluoro-guanosine
  modified_base 11: mod_base = OTHER; note = 2' Fluoro-guanosine
  modified_base 12: mod_base = OTHER; note = 2'O-methyl-adenosine
  modified_base 13: mod_base = cm
  modified_base 14: mod_base = OTHER; note = 2'O-methyl-adenosine
  modified_base 15: mod_base = gm
  modified_base 16: mod_base = OTHER; note = 2'O-methyl-adenosine
  modified_base 17: mod_base = gm
  modified_base 18: mod_base = OTHER; note = 2'O-methyl-adenosine
  modified_base 19: mod_base = um
  modified_base 20: mod_base = OTHER; note = 2'O-methyl-adenosine
  modified_base 21: mod_base = cm
  misc_feature 1^2: note = phosphorothioate linkage
  misc_feature 2^3: note = phosphorothioate linkage
gtgctggatgtacagagatac

SEQ ID NO: 516 - RNA, 21 nt, synthetic construct
  source 1..21: mol_type = other RNA
  misc_feature 1..21: note = Description: B4GALT1 siRNA sense strands (modified); Sense strand ID: ETXS1049; Underlying Base Sequence: SEQ ID NO: 340
  modified_base 1: mod_base = um
  modified_base 2: mod_base = um
  modified_base 3: mod_base = cm
  modified_base 4: mod_base = cm
  modified_base 5: mod_base = OTHER; note = 2'O-methyl-adenosine
  modified_base 6: mod_base = OTHER; note = 2'O-methyl-adenosine
  modified_base 7: mod_base = OTHER; note = 2'Fluoro-adenosine
  modified_base 8: mod_base = gm
  modified_base 9: mod_base = OTHER; note = 2' Fluoro-guanosine
  modified_base 10: mod_base = OTHER; note = 2' Fluoro-guanosine
  modified_base 11: mod_base = OTHER; note = 2' Fluoro-cytidine
  modified_base 12: mod_base = cm
  modified_base 13: mod_base = um
  modified_base 14: mod_base = um
  modified_base 15: mod_base = OTHER; note = 2'O-methyl-adenosine
  modified_base 16: mod_base = OTHER; note = 2'O-methyl-adenosine
  modified_base 17: mod_base = OTHER; note = 2'O-methyl-adenosine
  modified_base 18: mod_base = OTHER; note = 2'O-methyl-adenosine
  modified_base 19: mod_base = gm
  modified_base 20: mod_base = OTHER; note = 2'O-methyl-adenosine
  modified_base 21: mod_base = OTHER; note = 2'O-methyl-adenosine
  misc_feature 1^2: note = phosphorothioate linkage
  misc_feature 2^3: note = phosphorothioate linkage
ttccaaagtgccttaaaagaa

SEQ ID NO: 517 - RNA, 21 nt, synthetic construct
  source 1..21: mol_type = other RNA
  misc_feature 1..21: note = Description: B4GALT1 siRNA sense strands (modified); Sense strand ID: ETXS1051; Underlying Base Sequence: SEQ ID NO: 322
  modified_base 1: mod_base = gm
  modified_base 2: mod_base = cm
  modified_base 3: mod_base = um
  modified_base 4: mod_base = OTHER; note = 2'O-methyl-adenosine
  modified_base 5: mod_base = um
  modified_base 6: mod_base = gm
  modified_base 7: mod_base = OTHER; note = 2' Fluoro-guanosine
  modified_base 8: mod_base = OTHER; note = 2'O-methyl-adenosine
  modified_base 9: mod_base = OTHER; note = 2'Fluoro-adenosine
  modified_base 10: mod_base = OTHER; note = 2'Fluoro-adenosine
  modified_base 11: mod_base = OTHER; note = 2' Fluoro-cytidine
  modified_base 12: mod_base = um
  modified_base 13: mod_base = um
  modified_base 14: mod_base = gm
  modified_base 15: mod_base = OTHER; note = 2'O-methyl-adenosine
  modified_base 16: mod_base = OTHER; note = 2'O-methyl-adenosine
  modified_base 17: mod_base = um
  modified_base 18: mod_base = um
  modified_base 19: mod_base = um
  modified_base 20: mod_base = cm
  modified_base 21: mod_base = cm
  misc_feature 1^2: note = phosphorothioate linkage
  misc_feature 2^3: note = phosphorothioate linkage
gctatgtaaacttgaatttcc

SEQ ID NO: 518 - RNA, 21 nt, synthetic construct
  source 1..21: mol_type = other RNA
  misc_feature 1..21: note = Description: B4GALT1 siRNA sense strands (modified); Sense strand ID: ETXS1053; Underlying Base Sequence: SEQ ID NO: 334
  modified_base 1: mod_base = OTHER; note = 2'O-methyl-adenosine
  modified_base 2: mod_base = cm
  modified_base 3: mod_base = gm
  modified_base 4: mod_base = gm
  modified_base 5: mod_base = cm
  modified_base 6: mod_base = OTHER; note = 2'O-methyl-adenosine
  modified_base 7: mod_base = OTHER; note = 2' Fluoro-cytidine
  modified_base 8: mod_base = OTHER; note = 2'O-methyl-adenosine
  modified_base 9: mod_base = OTHER; note = 2' Fluoro-guanosine
  modified_base 10: mod_base = OTHER; note = 2' Fluoro-guanosine
  modified_base 11: mod_base = OTHER; note = 2' Fluoro-guanosine
  modified_base 12: mod_base = cm
  modified_base 13: mod_base = cm
  modified_base 14: mod_base = gm
  modified_base 15: mod_base = um
  modified_base 16: mod_base = um
  modified_base 17: mod_base = gm
  modified_base 18: mod_base = cm
  modified_base 19: mod_base = OTHER; note = 2'O-methyl-adenosine
  modified_base 20: mod_base = OTHER; note = 2'O-methyl-adenosine
  modified_base 21: mod_base = um
  misc_feature 1^2: note = phosphorothioate linkage
  misc_feature 2^3: note = phosphorothioate linkage
acggcacatttccgttgcaat

SEQ ID NO: 519 - RNA, 21 nt, synthetic construct
  source 1..21: mol_type = other RNA
  misc_feature 1..21: note = Description: B4GALT1 siRNA sense strands (modified); Sense strand ID: ETXS1055; Underlying Base Sequence: SEQ ID NO: 327
  modified_base 1: mod_base = cm
  modified_base 2: mod_base = um
  modified_base 3: mod_base = OTHER; note = 2'O-methyl-adenosine
  modified_base 4: mod_base = um
  modified_base 5: mod_base = gm
  modified_base 6: mod_base = um
  modified_base 7: mod_base = OTHER; note = 2'Fluoro-adenosine
  modified_base 8: mod_base = OTHER; note = 2'O-methyl-adenosine
  modified_base 9: mod_base = OTHER; note = 2'Fluoro-adenosine
  modified_base 10: mod_base = OTHER; note = 2' Fluoro-cytidine
  modified_base 11: mod_base = OTHER; note = 2' Fluoro-guanosine
  modified_base 12: mod_base = um
  modified_base 13: mod_base = gm
  modified_base 14: mod_base = OTHER; note = 2'O-methyl-adenosine
  modified_base 15: mod_base = OTHER; note = 2'O-methyl-adenosine
  modified_base 16: mod_base = um
  modified_base 17: mod_base = um
  modified_base 18: mod_base = um
  modified_base 19: mod_base = cm
  modified_base 20: mod_base = cm
  modified_base 21: mod_base = um
  misc_feature 1^2: note = phosphorothioate linkage
  misc_feature 2^3: note = phosphorothioate linkage
ctatgtaaacttgaatttcct

SEQ ID NO: 520 - RNA, 21 nt, synthetic construct
  source 1..21: mol_type = other RNA
  misc_feature 1..21: note = Description: B4GALT1 siRNA sense strands (modified); Sense strand ID: ETXS1057; Underlying Base Sequence: SEQ ID NO: 316
  modified_base 1: mod_base = cm
  modified_base 2: mod_base = OTHER; note = 2'O-methyl-adenosine
  modified_base 3: mod_base = OTHER; note = 2'O-methyl-adenosine
  modified_base 4: mod_base = um
  modified_base 5: mod_base = gm
  modified_base 6: mod_base = gm
  modified_base 7: mod_base = OTHER; note = 2'Fluoro-adenosine
  modified_base 8: mod_base = um
  modified_base 9: mod_base = OTHER; note = 2' Fluoro-guanosine
  modified_base 10: mod_base = OTHER; note = 2' Fluoro-guanosine
  modified_base 11: mod_base = OTHER; note = 2' Fluoro-cytidine
  modified_base 12: mod_base = cm
  modified_base 13: mod_base = um
  modified_base 14: mod_base = OTHER; note = 2'O-methyl-adenosine
  modified_base 15: mod_base = OTHER; note = 2'O-methyl-adenosine
  modified_base 16: mod_base = um
  modified_base 17: mod_base = OTHER; note = 2'O-methyl-adenosine
  modified_base 18: mod_base = OTHER; note = 2'O-methyl-adenosine
  modified_base 19: mod_base = um
  modified_base 20: mod_base = um
  modified_base 21: mod_base = OTHER; note = 2'O-methyl-adenosine
  misc_feature 1^2: note = phosphorothioate linkage
  misc_feature 2^3: note = phosphorothioate linkage
caatggatttcctaataatta

SEQ ID NO: 521 - RNA, 21 nt, synthetic construct
  source 1..21: mol_type = other RNA
  misc_feature 1..21: note = Description: B4GALT1 siRNA sense strands (modified); Sense strand ID: ETXS1059; Underlying Base Sequence: SEQ ID NO: 323
  modified_base 1: mod_base = gm
  modified_base 2: mod_base = gm
  modified_base 3: mod_base = um
  modified_base 4: mod_base = gm
  modified_base 5: mod_base = um
  modified_base 6: mod_base = cm
  modified_base 7: mod_base = OTHER; note = 2' Fluoro-guanosine
  modified_base 8: mod_base = cm
  modified_base 9: mod_base = OTHER; note = 2' Fluoro-guanosine
  modified_base 10: mod_base = OTHER; note = 2' Fluoro-guanosine
  modified_base 11: mod_base = OTHER; note = 2' Fluoro-cytidine
  modified_base 12: mod_base = um
  modified_base 13: mod_base = cm
  modified_base 14: mod_base = um
  modified_base 15: mod_base = OTHER; note = 2'O-methyl-adenosine
  modified_base 16: mod_base = OTHER; note = 2'O-methyl-adenosine
  modified_base 17: mod_base = gm
  modified_base 18: mod_base = um
  modified_base 19: mod_base = OTHER; note = 2'O-methyl-adenosine
  modified_base 20: mod_base = OTHER; note = 2'O-methyl-adenosine
  modified_base 21: mod_base = OTHER; note = 2'O-methyl-adenosine
  misc_feature 1^2: note = phosphorothioate linkage
  misc_feature 2^3: note = phosphorothioate linkage
ggtgtctctgctctaagtaaa

SEQ ID NO: 522 - RNA, 21 nt, synthetic construct
  source 1..21: mol_type = other RNA
  misc_feature 1..21: note = Description: B4GALT1 siRNA sense strands (modified); Sense strand ID: ETXS1061; Underlying Base Sequence: SEQ ID NO: 326
  modified_base 1: mod_base = um
  modified_base 2: mod_base = cm
  modified_base 3: mod_base = cm
  modified_base 4: mod_base = OTHER; note = 2'O-methyl-adenosine
  modified_base 5: mod_base = OTHER; note = 2'O-methyl-adenosine
  modified_base 6: mod_base = OTHER; note = 2'O-methyl-adenosine
  modified_base 7: mod_base = OTHER; note = 2' Fluoro-guanosine
  modified_base 8: mod_base = um
  modified_base 9: mod_base = OTHER; note = 2' Fluoro-guanosine
  modified_base 10: mod_base = OTHER; note = 2' Fluoro-cytidine
  modified_base 11: mod_base = OTHER; note = 2' Fluoro-cytidine
  modified_base 12: mod_base = um
  modified_base 13: mod_base = um
  modified_base 14: mod_base = OTHER; note = 2'O-methyl-adenosine
  modified_base 15: mod_base = OTHER; note = 2'O-methyl-adenosine
  modified_base 16: mod_base = OTHER; note = 2'O-methyl-adenosine
  modified_base 17: mod_base = OTHER; note = 2'O-methyl-adenosine
  modified_base 18: mod_base = gm
  modified_base 19: mod_base = OTHER; note = 2'O-methyl-adenosine
  modified_base 20: mod_base = OTHER; note = 2'O-methyl-adenosine
  modified_base 21: mod_base = OTHER; note = 2'O-methyl-adenosine
  misc_feature 1^2: note = phosphorothioate linkage
  misc_feature 2^3: note = phosphorothioate linkage
tccaaagtgccttaaaagaaa

SEQ ID NO: 523 - RNA, 21 nt, synthetic construct
  source 1..21: mol_type = other RNA
  misc_feature 1..21: note = Description: B4GALT1 siRNA sense strands (modified); Sense strand ID: ETXS1063; Underlying Base Sequence: SEQ ID NO: 324
  modified_base 1: mod_base = cm
  modified_base 2: mod_base = OTHER; note = 2'O-methyl-adenosine
  modified_base 3: mod_base = um
  modified_base 4: mod_base = gm
  modified_base 5: mod_base = OTHER; note = 2'O-methyl-adenosine
  modified_base 6: mod_base = OTHER; note = 2'O-methyl-adenosine
  modified_base 7: mod_base = OTHER; note = 2' Fluoro-guanosine
  modified_base 8: mod_base = gm
  modified_base 9: mod_base = OTHER; note = 2' Fluoro-guanosine
  modified_base 10: mod_base = OTHER; note = 2' Fluoro-guanosine
  modified_base 11: mod_base = OTHER; note = 2' Fluoro-cytidine
  modified_base 12: mod_base = cm
  modified_base 13: mod_base = um
  modified_base 14: mod_base = um
  modified_base 15: mod_base = um
  modified_base 16: mod_base = um
  modified_base 17: mod_base = OTHER; note = 2'O-methyl-adenosine
  modified_base 18: mod_base = OTHER; note = 2'O-methyl-adenosine
  modified_base 19: mod_base = um
  modified_base 20: mod_base = um
  modified_base 21: mod_base = OTHER; note = 2'O-methyl-adenosine
  misc_feature 1^2: note = phosphorothioate linkage
  misc_feature 2^3: note = phosphorothioate linkage
catgaatgtgccttttaatta

SEQ ID NO: 524 - RNA, 21 nt, synthetic construct
  source 1..21: mol_type = other RNA
  misc_feature 1..21: note = Description: B4GALT1 siRNA sense strands (modified); Sense strand ID: ETXS1065; Underlying Base Sequence: SEQ ID NO: 302
  modified_base 1: mod_base = OTHER; note = 2'O-methyl-adenosine
  modified_base 2: mod_base = OTHER; note = 2'O-methyl-adenosine
  modified_base 3: mod_base = OTHER; note = 2'O-methyl-adenosine
  modified_base 4: mod_base = cm
  modified_base 5: mod_base = um
  modified_base 6: mod_base = um
  modified_base 7: mod_base = OTHER; note = 2' Fluoro-guanosine
  modified_base 8: mod_base = OTHER; note = 2'O-methyl-adenosine
  modified_base 9: mod_base = OTHER; note = 2'Fluoro-adenosine
  modified_base 10: mod_base = OTHER; note = 2' Fluoro-guanosine
  modified_base 11: mod_base = OTHER; note = 2' Fluoro-guanosine
  modified_base 12: mod_base = um
  modified_base 13: mod_base = cm
  modified_base 14: mod_base = cm
  modified_base 15: mod_base = um
  modified_base 16: mod_base = OTHER; note = 2'O-methyl-adenosine
  modified_base 17: mod_base = um
  modified_base 18: mod_base = gm
  modified_base 19: mod_base = um
  modified_base 20: mod_base = OTHER; note = 2'O-methyl-adenosine
  modified_base 21: mod_base = um
  misc_feature 1^2: note = phosphorothioate linkage
  misc_feature 2^3: note = phosphorothioate linkage
aaacttgaatttcctatgtat

SEQ ID NO: 525 - RNA, 21 nt, synthetic construct
  source 1..21: mol_type = other RNA
  misc_feature 1..21: note = Description: B4GALT1 siRNA sense strands (modified); Sense strand ID: ETXS1067; Underlying Base Sequence: SEQ ID NO: 369
  modified_base 1: mod_base = um
  modified_base 2: mod_base = cm
  modified_base 3: mod_base = cm
  modified_base 4: mod_base = um
  modified_base 5: mod_base = gm
  modified_base 6: mod_base = OTHER; note = 2'O-methyl-adenosine
  modified_base 7: mod_base = OTHER; note = 2' Fluoro-cytidine
  modified_base 8: mod_base = um
  modified_base 9: mod_base = OTHER; note = 2' Fluoro-guanosine
  modified_base 10: mod_base = OTHER; note = 2' Fluoro-guanosine
  modified_base 11: mod_base = OTHER; note = 2' Fluoro-guanosine
  modified_base 12: mod_base = cm
  modified_base 13: mod_base = cm
  modified_base 14: mod_base = OTHER; note = 2'O-methyl-adenosine
  modified_base 15: mod_base = OTHER; note = 2'O-methyl-adenosine
  modified_base 16: mod_base = OTHER; note = 2'O-methyl-adenosine
  modified_base 17: mod_base = gm
  modified_base 18: mod_base = um
  modified_base 19: mod_base = gm
  modified_base 20: mod_base = cm
  modified_base 21: mod_base = cm
  misc_feature 1^2: note = phosphorothioate linkage
  misc_feature 2^3: note = phosphorothioate linkage
tcctgacttttccaaagtgcc

SEQ ID NO: 526 - RNA, 21 nt, synthetic construct
  source 1..21: mol_type = other RNA
  misc_feature 1..21: note = Description: B4GALT1 siRNA sense strands (modified); Sense strand ID: ETXS1069; Underlying Base Sequence: SEQ ID NO: 319
  modified_base 1: mod_base = OTHER; note = 2'O-methyl-adenosine
  modified_base 2: mod_base = um
  modified_base 3: mod_base = cm
  modified_base 4: mod_base = OTHER; note = 2'O-methyl-adenosine
  modified_base 5: mod_base = OTHER; note = 2'O-methyl-adenosine
  modified_base 6: mod_base = um
  modified_base 7: mod_base = OTHER; note = 2' Fluoro-guanosine
  modified_base 8: mod_base = gm
  modified_base 9: mod_base = OTHER; note = 2'Fluoro-adenosine
  modified_base 10: mod_base = OTHER; note = 2' Fluoro-guanosine
  modified_base 11: mod_base = OTHER; note = 2' Fluoro-guanosine
  modified_base 12: mod_base = um
  modified_base 13: mod_base = cm
  modified_base 14: mod_base = cm
  modified_base 15: mod_base = um
  modified_base 16: mod_base = OTHER; note = 2'O-methyl-adenosine
  modified_base 17: mod_base = OTHER; note = 2'O-methyl-adenosine
  modified_base 18: mod_base = um
  modified_base 19: mod_base = OTHER; note = 2'O-methyl-adenosine
  modified_base 20: mod_base = OTHER; note = 2'O-methyl-adenosine
  modified_base 21: mod_base = um
  misc_feature 1^2: note = phosphorothioate linkage
  misc_feature 2^3: note = phosphorothioate linkage
atcaatggatttcctaataat

SEQ ID NO: 527 - RNA, 21 nt, synthetic construct
  source 1..21: mol_type = other RNA
  misc_feature 1..21: note = Description: B4GALT1 siRNA sense strands (modified); Sense strand ID: ETXS1071; Underlying Base Sequence: SEQ ID NO: 362
  modified_base 1: mod_base = um
  modified_base 2: mod_base = gm
  modified_base 3: mod_base = um
  modified_base 4: mod_base = um
  modified_base 5: mod_base = cm
  modified_base 6: mod_base = OTHER; note = 2'O-methyl-adenosine
  modified_base 7: mod_base = OTHER; note = 2' Fluoro-guanosine
  modified_base 8: mod_base = um
  modified_base 9: mod_base = OTHER; note = 2'Fluoro-adenosine
  modified_base 10: mod_base = OTHER; note = 2' Fluoro-guanosine
  modified_base 11: mod_base = OTHER; note = 2' Fluoro-guanosine
  modified_base 12: mod_base = um
  modified_base 13: mod_base = um
  modified_base 14: mod_base = gm
  modified_base 15: mod_base = gm
  modified_base 16: mod_base = OTHER; note = 2'O-methyl-adenosine
  modified_base 17: mod_base = gm
  modified_base 18: mod_base = gm
  modified_base 19: mod_base = um
  modified_base 20: mod_base = gm
  modified_base 21: mod_base = um
  misc_feature 1^2: note = phosphorothioate linkage
  misc_feature 2^3: note = phosphorothioate linkage
tgttcagtattttggaggtgt

SEQ ID NO: 528 - RNA, 21 nt, synthetic construct
  source 1..21: mol_type = other RNA
  misc_feature 1..21: note = Description: B4GALT1 siRNA sense strands (modified); Sense strand ID: ETXS1073; Underlying Base Sequence: SEQ ID NO: 378
  modified_base 1: mod_base = OTHER; note = 2'O-methyl-adenosine
  modified_base 2: mod_base = um
  modified_base 3: mod_base = cm
  modified_base 4: mod_base = cm
  modified_base 5: mod_base = um
  modified_base 6: mod_base = gm
  modified_base 7: mod_base = OTHER; note = 2'Fluoro-adenosine
  modified_base 8: mod_base = cm
  modified_base 9: mod_base = OTHER; note = 2' Fluoro-guanosine
  modified_base 10: mod_base = OTHER; note = 2' Fluoro-guanosine
  modified_base 11: mod_base = OTHER; note = 2' Fluoro-guanosine
  modified_base 12: mod_base = um
  modified_base 13: mod_base = cm
  modified_base 14: mod_base = cm
  modified_base 15: mod_base = OTHER; note = 2'O-methyl-adenosine
  modified_base 16: mod_base = OTHER; note = 2'O-methyl-adenosine
  modified_base 17: mod_base = OTHER; note = 2'O-methyl-adenosine
  modified_base 18: mod_base = gm
  modified_base 19: mod_base = um
  modified_base 20: mod_base = gm
  modified_base 21: mod_base = cm
  misc_feature 1^2: note = phosphorothioate linkage
  misc_feature 2^3: note = phosphorothioate linkage
atcctgacttttccaaagtgc

SEQ ID NO: 529 - RNA, 21 nt, synthetic construct
  source 1..21: mol_type = other RNA
  misc_feature 1..21: note = Description: B4GALT1 siRNA sense strands (modified); Sense strand ID: ETXS1075; Underlying Base Sequence: SEQ ID NO: 312
  modified_base 1: mod_base = OTHER; note = 2'O-methyl-adenosine
  modified_base 2: mod_base = um
  modified_base 3: mod_base = gm
  modified_base 4: mod_base = gm
  modified_base 5: mod_base = OTHER; note = 2'O-methyl-adenosine
  modified_base 6: mod_base = um
  modified_base 7: mod_base = OTHER; note = 2' Fluoro-guanosine
  modified_base 8: mod_base = um
  modified_base 9: mod_base = OTHER; note = 2' Fluoro-cytidine
  modified_base 10: mod_base = OTHER; note = 2' Fluoro-cytidine
  modified_base 11: mod_base = OTHER; note = 2' Fluoro-guanosine
  modified_base 12: mod_base = OTHER; note = 2'O-methyl-adenosine
  modified_base 13: mod_base = OTHER; note = 2'O-methyl-adenosine
  modified_base 14: mod_base = um
  modified_base 15: mod_base = OTHER; note = 2'O-methyl-adenosine
  modified_base 16: mod_base = OTHER; note = 2'O-methyl-adenosine
  modified_base 17: mod_base = um
  modified_base 18: mod_base = um
  modified_base 19: mod_base = OTHER; note = 2'O-methyl-adenosine
  modified_base 20: mod_base = um
  modified_base 21: mod_base = um
  misc_feature 1^2: note = phosphorothioate linkage
  misc_feature 2^3: note = phosphorothioate linkage
atggatttcctaataattatt

SEQ ID NO: 530 - RNA, 21 nt, synthetic construct
  source 1..21: mol_type = other RNA
  misc_feature 1..21: note = Description: B4GALT1 siRNA sense strands (modified); Sense strand ID: ETXS1077; Underlying Base Sequence: SEQ ID NO: 329
  modified_base 1: mod_base = OTHER; note = 2'O-methyl-adenosine
  modified_base 2: mod_base = gm
  modified_base 3: mod_base = cm
  modified_base 4: mod_base = OTHER; note = 2'O-methyl-adenosine
  modified_base 5: mod_base = um
  modified_base 6: mod_base = gm
  modified_base 7: mod_base = OTHER; note = 2'Fluoro-adenosine
  modified_base 8: mod_base = OTHER; note = 2'O-methyl-adenosine
  modified_base 9: mod_base = OTHER; note = 2' Fluoro-guanosine
  modified_base 10: mod_base = OTHER; note = 2' Fluoro-guanosine
  modified_base 11: mod_base = OTHER; note = 2' Fluoro-guanosine
  modified_base 12: mod_base = gm
  modified_base 13: mod_base = cm
  modified_base 14: mod_base = cm
  modified_base 15: mod_base = um
  modified_base 16: mod_base = um
  modified_base 17: mod_base = um
  modified_base 18: mod_base = um
  modified_base 19: mod_base = OTHER; note = 2'O-methyl-adenosine
  modified_base 20: mod_base = OTHER; note = 2'O-methyl-adenosine
  modified_base 21: mod_base = um
  misc_feature 1^2: note = phosphorothioate linkage
  misc_feature 2^3: note = phosphorothioate linkage
agcatgaatgtgccttttaat

SEQ ID NO: 531 - RNA, 21 nt, synthetic construct
  source 1..21: mol_type = other RNA
  misc_feature 1..21: note = Description: B4GALT1 siRNA sense strands (modified); Sense strand ID: ETXS1079; Underlying Base Sequence: SEQ ID NO: 342
  modified_base 1: mod_base = um
  modified_base 2: mod_base = gm
  modified_base 3: mod_base = um
  modified_base 4: mod_base = cm
  modified_base 5: mod_base = um
  modified_base 6: mod_base = cm
  modified_base 7: mod_base = OTHER; note = 2' Fluoro-guanosine
  modified_base 8: mod_base = gm
  modified_base 9: mod_base = OTHER; note = 2' Fluoro-cytidine
  modified_base 10: mod_base = OTHER; note = 2' Fluoro-guanosine
  modified_base 11: mod_base = OTHER; note = 2' Fluoro-cytidine
  modified_base 12: mod_base = um
  modified_base 13: mod_base = OTHER; note = 2'O-methyl-adenosine
  modified_base 14: mod_base = OTHER; note = 2'O-methyl-adenosine
  modified_base 15: mod_base = gm
  modified_base 16: mod_base = um
  modified_base 17: mod_base = OTHER; note = 2'O-methyl-adenosine
  modified_base 18: mod_base = OTHER; note = 2'O-methyl-adenosine
  modified_base 19: mod_base = OTHER; note = 2'O-methyl-adenosine
  modified_base 20: mod_base = cm
  modified_base 21: mod_base = OTHER; note = 2'O-methyl-adenosine
  misc_feature 1^2: note = phosphorothioate linkage
  misc_feature 2^3: note = phosphorothioate linkage
tgtctctgctctaagtaaaca

SEQ ID NO: 532 - RNA, 21 nt, synthetic construct
  source 1..21: mol_type = other RNA
  misc_feature 1..21: note = Description: B4GALT1 siRNA sense strands (modified); Sense strand ID: ETXS1081; Underlying Base Sequence: SEQ ID NO: 393
  modified_base 1: mod_base = OTHER; note = 2'O-methyl-adenosine
  modified_base 2: mod_base = um
  modified_base 3: mod_base = gm
  modified_base 4: mod_base = um
  modified_base 5: mod_base = um
  modified_base 6: mod_base = cm
  modified_base 7: mod_base = OTHER; note = 2'Fluoro-adenosine
  modified_base 8: mod_base = gm
  modified_base 9: mod_base = OTHER; note = 2' Fluoro-guanosine
  modified_base 10: mod_base = OTHER; note = 2'Fluoro-adenosine
  modified_base 11: mod_base = OTHER; note = 2' Fluoro-guanosine
  modified_base 12: mod_base = um
  modified_base 13: mod_base = um
  modified_base 14: mod_base = um
  modified_base 15: mod_base = gm
  modified_base 16: mod_base = gm
  modified_base 17: mod_base = OTHER; note = 2'O-methyl-adenosine
  modified_base 18: mod_base = gm
  modified_base 19: mod_base = gm
  modified_base 20: mod_base = um
  modified_base 21: mod_base = gm
  misc_feature 1^2: note = phosphorothioate linkage
  misc_feature 2^3: note = phosphorothioate linkage
atgttcagtattttggaggtg

SEQ ID NO: 533 - RNA, 21 nt, synthetic construct
  source 1..21: mol_type = other RNA
  misc_feature 1..21: note = Description: B4GALT1 siRNA sense strands (modified); Sense strand ID: ETXS1083; Underlying Base Sequence: SEQ ID NO: 354
  modified_base 1: mod_base = gm
  modified_base 2: mod_base = OTHER; note = 2'O-methyl-adenosine
  modified_base 3: mod_base = um
  modified_base 4: mod_base = cm
  modified_base 5: mod_base = cm
  modified_base 6: mod_base = um
  modified_base 7: mod_base = OTHER; note = 2' Fluoro-guanosine
  modified_base 8: mod_base = OTHER; note = 2'O-methyl-adenosine
  modified_base 9: mod_base = OTHER; note = 2' Fluoro-cytidine
  modified_base 10: mod_base = OTHER; note = 2' Fluoro-guanosine
  modified_base 11: mod_base = OTHER; note = 2' Fluoro-guanosine
  modified_base 12: mod_base = um
  modified_base 13: mod_base = um
  modified_base 14: mod_base = cm
  modified_base 15: mod_base = cm
  modified_base 16: mod_base = OTHER; note = 2'O-methyl-adenosine
  modified_base 17: mod_base = OTHER; note = 2'O-methyl-adenosine
  modified_base 18: mod_base = OTHER; note = 2'O-methyl-adenosine
  modified_base 19: mod_base = gm
  modified_base 20: mod_base = um
  modified_base 21: mod_base = gm
  misc_feature 1^2: note = phosphorothioate linkage
  misc_feature 2^3: note = phosphorothioate linkage
gatcctgacttttccaaagtg

SEQ ID NO: 534 - RNA, 21 nt, synthetic construct
  source 1..21: mol_type = other RNA
  misc_feature 1..21: note = Description: B4GALT1 siRNA sense strands (modified); Sense strand ID: ETXS1085; Underlying Base Sequence: SEQ ID NO: 308
  modified_base 1: mod_base = OTHER; note = 2'O-methyl-adenosine
  modified_base 2: mod_base = um
  modified_base 3: mod_base = gm
  modified_base 4: mod_base = cm
  modified_base 5: mod_base = um
  modified_base 6: mod_base = OTHER; note = 2'O-methyl-adenosine
  modified_base 7: mod_base = OTHER; note = 2' Fluoro-guanosine
  modified_base 8: mod_base = gm
  modified_base 9: mod_base = OTHER; note = 2' Fluoro-guanosine
  modified_base 10: mod_base = OTHER; note = 2'Fluoro-adenosine
  modified_base 11: mod_base = OTHER; note = 2'Fluoro-adenosine
  modified_base 12: mod_base = OTHER; note = 2'O-methyl-adenosine
  modified_base 13: mod_base = cm
  modified_base 14: mod_base = um
  modified_base 15: mod_base = um
  modified_base 16: mod_base = gm
  modified_base 17: mod_base = OTHER; note = 2'O-methyl-adenosine
  modified_base 18: mod_base = OTHER; note = 2'O-methyl-adenosine
  modified_base 19: mod_base = um
  modified_base 20: mod_base = um
  modified_base 21: mod_base = um
  misc_feature 1^2: note = phosphorothioate linkage
  misc_feature 2^3: note = phosphorothioate linkage
atgctatgtaaacttgaattt

SEQ ID NO: 535 - RNA, 21 nt, synthetic construct
  source 1..21: mol_type = other RNA
  misc_feature 1..21: note = Description: B4GALT1 siRNA sense strands (modified); Sense strand ID: ETXS1087; Underlying Base Sequence: SEQ ID NO: 360
  modified_base 1: mod_base = gm
  modified_base 2: mod_base = cm
  modified_base 3: mod_base = um
  modified_base 4: mod_base = cm
  modified_base 5: mod_base = um
  modified_base 6: mod_base = OTHER; note = 2'O-methyl-adenosine
  modified_base 7: mod_base = OTHER; note = 2'Fluoro-adenosine
  modified_base 8: mod_base = gm
  modified_base 9: mod_base = OTHER; note = 2' Fluoro-guanosine
  modified_base 10: mod_base = OTHER; note = 2'Fluoro-adenosine
  modified_base 11: mod_base = OTHER; note = 2'Fluoro-adenosine
  modified_base 12: mod_base = OTHER; note = 2'O-methyl-adenosine
  modified_base 13: mod_base = cm
  modified_base 14: mod_base = OTHER; note = 2'O-methyl-adenosine
  modified_base 15: mod_base = OTHER; note = 2'O-methyl-adenosine
  modified_base 16: mod_base = cm
  modified_base 17: mod_base = OTHER; note = 2'O-methyl-adenosine
  modified_base 18: mod_base = gm
  modified_base 19: mod_base = um
  modified_base 20: mod_base = um
  modified_base 21: mod_base = um
  misc_feature 1^2: note = phosphorothioate linkage
  misc_feature 2^3: note = phosphorothioate linkage
gctctaagtaaacaacagttt

SEQ ID NO: 536 - RNA, 21 nt, synthetic construct
  source 1..21: mol_type = other RNA
  misc_feature 1..21: note = Description: B4GALT1 siRNA sense strands (modified); Sense strand ID: ETXS1089; Underlying Base Sequence: SEQ ID NO: 381
  modified_base 1: mod_base = gm
  modified_base 2: mod_base = cm
  modified_base 3: mod_base = um
  modified_base 4: mod_base = gm
  modified_base 5: mod_base = gm
  modified_base 6: mod_base = OTHER; note = 2'O-methyl-adenosine
  modified_base 7: mod_base = OTHER; note = 2' Fluoro-guanosine
  modified_base 8: mod_base = gm
  modified_base 9: mod_base = OTHER; note = 2' Fluoro-guanosine
  modified_base 10: mod_base = OTHER; note = 2'Fluoro-adenosine
  modified_base 11: mod_base = OTHER; note = 2' Fluoro-cytidine
  modified_base 12: mod_base = OTHER; note = 2'O-methyl-adenosine
  modified_base 13: mod_base = gm
  modified_base 14: mod_base = OTHER; note = 2'O-methyl-adenosine
  modified_base 15: mod_base = gm
  modified_base 16: mod_base = OTHER; note = 2'O-methyl-adenosine
  modified_base 17: mod_base = um
  modified_base 18: mod_base = OTHER; note = 2'O-methyl-adenosine
  modified_base 19: mod_base = cm
  modified_base 20: mod_base = cm
  modified_base 21: mod_base = cm
  misc_feature 1^2: note = phosphorothioate linkage
  misc_feature 2^3: note = phosphorothioate linkage
gctggatgtacagagataccc

SEQ ID NO: 537 - RNA, 21 nt, synthetic construct
  source 1..21: mol_type = other RNA
  misc_feature 1..21: note = Description: B4GALT1 siRNA sense strands (modified); Sense strand ID: ETXS1091; Underlying Base Sequence: SEQ ID NO: 347
  modified_base 1: mod_base = um
  modified_base 2: mod_base = cm
  modified_base 3: mod_base = um
  modified_base 4: mod_base = cm
  modified_base 5: mod_base = um
  modified_base 6: mod_base = gm
  modified_base 7: mod_base = OTHER; note = 2' Fluoro-cytidine
  modified_base 8: mod_base = um
  modified_base 9: mod_base = OTHER; note = 2' Fluoro-cytidine
  modified_base 10: mod_base = OTHER; note = 2' Fluoro-guanosine
  modified_base 11: mod_base = OTHER; note = 2'Fluoro-adenosine
  modified_base 12: mod_base = OTHER; note = 2'O-methyl-adenosine
  modified_base 13: mod_base = gm
  modified_base 14: mod_base = um
  modified_base 15: mod_base = OTHER; note = 2'O-methyl-adenosine
  modified_base 16: mod_base = OTHER; note = 2'O-methyl-adenosine
  modified_base 17: mod_base = OTHER; note = 2'O-methyl-adenosine
  modified_base 18: mod_base = cm
  modified_base 19: mod_base = OTHER; note = 2'O-methyl-adenosine
  modified_base 20: mod_base = OTHER; note = 2'O-methyl-adenosine
  modified_base 21: mod_base = cm
  misc_feature 1^2: note = phosphorothioate linkage
  misc_feature 2^3: note = phosphorothioate linkage
tctctgctctaagtaaacaac

SEQ ID NO: 538 - RNA, 21 nt, synthetic construct
  source 1..21: mol_type = other RNA
  misc_feature 1..21: note = Description: B4GALT1 siRNA sense strands (modified); Sense strand ID: ETXS1093; Underlying Base Sequence: SEQ ID NO: 303
  modified_base 1: mod_base = um
  modified_base 2: mod_base = OTHER; note = 2'O-methyl-adenosine
  modified_base 3: mod_base = um
  modified_base 4: mod_base = gm
  modified_base 5: mod_base = um
  modified_base 6: mod_base = OTHER; note = 2'O-methyl-adenosine
  modified_base 7: mod_base = OTHER; note = 2'Fluoro-adenosine
  modified_base 8: mod_base = OTHER; note = 2'O-methyl-adenosine
  modified_base 9: mod_base = OTHER; note = 2' Fluoro-cytidine
  modified_base 10: mod_base = OTHER; note = 2' Fluoro-guanosine
  modified_base 11: mod_base = OTHER; note = 2' Fluoro-guanosine
  modified_base 12: mod_base = gm
  modified_base 13: mod_base = OTHER; note = 2'O-methyl-adenosine
  modified_base 14: mod_base = OTHER; note = 2'O-methyl-adenosine
  modified_base 15: mod_base = um
  modified_base 16: mod_base = um
  modified_base 17: mod_base = um
  modified_base 18: mod_base = cm
  modified_base 19: mod_base = cm
  modified_base 20: mod_base = um
  modified_base 21: mod_base = OTHER; note = 2'O-methyl-adenosine
  misc_feature 1^2: note = phosphorothioate linkage
  misc_feature 2^3: note = phosphorothioate linkage
tatgtaaacttgaatttccta

SEQ ID NO: 539 - RNA, 21 nt, synthetic construct
  source 1..21: mol_type = other RNA
  misc_feature 1..21: note = Description: B4GALT1 siRNA sense strands (modified); Sense strand ID: ETXS1095; Underlying Base Sequence: SEQ ID NO: 351
  modified_base 1: mod_base = um
  modified_base 2: mod_base = OTHER; note = 2'O-methyl-adenosine
  modified_base 3: mod_base = cm
  modified_base 4: mod_base = cm
  modified_base 5: mod_base = cm
  modified_base 6: mod_base = OTHER; note = 2'O-methyl-adenosine
  modified_base 7: mod_base = OTHER; note = 2'Fluoro-adenosine
  modified_base 8: mod_base = OTHER; note = 2'O-methyl-adenosine
  modified_base 9: mod_base = OTHER; note = 2' Fluoro-guanosine
  modified_base 10: mod_base = OTHER; note = 2' Fluoro-cytidine
  modified_base 11: mod_base = OTHER; note = 2'Fluoro-adenosine
  modified_base 12: mod_base = cm
  modified_base 13: mod_base = OTHER; note = 2'O-methyl-adenosine
  modified_base 14: mod_base = gm
  modified_base 15: mod_base = um
  modified_base 16: mod_base = gm
  modified_base 17: mod_base = gm
  modified_base 18: mod_base = OTHER; note = 2'O-methyl-adenosine
  modified_base 19: mod_base = cm
  modified_base 20: mod_base = OTHER; note = 2'O-methyl-adenosine
  modified_base 21: mod_base = um
  misc_feature 1^2: note = phosphorothioate linkage
  misc_feature 2^3: note = phosphorothioate linkage
tacccaaatcacagtggacat

SEQ ID NO: 540 - RNA, 21 nt, synthetic construct
  source 1..21: mol_type = other RNA
  misc_feature 1..21: note = Description: B4GALT1 siRNA sense strands (modified); Sense strand ID: ETXS1097; Underlying Base Sequence: SEQ ID NO: 315
  modified_base 1: mod_base = um
  modified_base 2: mod_base = cm
  modified_base 3: mod_base = cm
  modified_base 4: mod_base = um
  modified_base 5: mod_base = cm
  modified_base 6: mod_base = OTHER; note = 2'O-methyl-adenosine
  modified_base 7: mod_base = OTHER; note = 2' Fluoro-guanosine
  modified_base 8: mod_base = OTHER; note = 2'O-methyl-adenosine
  modified_base 9: mod_base = OTHER; note = 2' Fluoro-guanosine
  modified_base 10: mod_base = OTHER; note = 2' Fluoro-guanosine
  modified_base 11: mod_base = OTHER; note = 2' Fluoro-guanosine
  modified_base 12: mod_base = um
  modified_base 13: mod_base = um
  modified_base 14: mod_base = gm
  modified_base 15: mod_base = OTHER; note = 2'O-methyl-adenosine
  modified_base 16: mod_base = cm
  modified_base 17: mod_base = cm
  modified_base 18: mod_base = gm
  modified_base 19: mod_base = OTHER; note = 2'O-methyl-adenosine
  modified_base 20: mod_base = OTHER; note = 2'O-methyl-adenosine
  modified_base 21: mod_base = um
  misc_feature 1^2: note = phosphorothioate linkage
  misc_feature 2^3: note = phosphorothioate linkage
tcctcagaggtttgaccgaat

SEQ ID NO: 541 - RNA, 21 nt, synthetic construct
  source 1..21: mol_type = other RNA
  misc_feature 1..21: note = Description: B4GALT1 siRNA sense strands (modified); Sense strand ID: ETXS1099; Underlying Base Sequence: SEQ ID NO: 306
  modified_base 1: mod_base = OTHER; note = 2'O-methyl-adenosine
  modified_base 2: mod_base = cm
  modified_base 3: mod_base = um
  modified_base 4: mod_base = um
  modified_base 5: mod_base = gm
  modified_base 6: mod_base = OTHER; note = 2'O-methyl-adenosine
  modified_base 7: mod_base = OTHER; note = 2'Fluoro-adenosine
  modified_base 8: mod_base = um
  modified_base 9: mod_base = OTHER; note = 2' Fluoro-guanosine
  modified_base 10: mod_base = OTHER; note = 2' Fluoro-guanosine
  modified_base 11: mod_base = OTHER; note = 2' Fluoro-cytidine
  modified_base 12: mod_base = cm
  modified_base 13: mod_base = um
  modified_base 14: mod_base = OTHER; note = 2'O-methyl-adenosine
  modified_base 15: mod_base = um
  modified_base 16: mod_base = gm
  modified_base 17: mod_base = um
  modified_base 18: mod_base = OTHER; note = 2'O-methyl-adenosine
  modified_base 19: mod_base = um
  modified_base 20: mod_base = um
  modified_base 21: mod_base = um
  misc_feature 1^2: note = phosphorothioate linkage
  misc_feature 2^3: note = phosphorothioate linkage
acttgaatttcctatgtattt

SEQ ID NO: 542 - RNA, 21 nt, synthetic construct
  source 1..21: mol_type = other RNA
  misc_feature 1..21: note = Description: B4GALT1 siRNA sense strands (modified); Sense strand ID: ETXS1101; Underlying Base Sequence: SEQ ID NO: 349
  modified_base 1: mod_base = OTHER; note = 2'O-methyl-adenosine
  modified_base 2: mod_base = um
  modified_base 3: mod_base = gm
  modified_base 4: mod_base = OTHER; note = 2'O-methyl-adenosine
  modified_base 5: mod_base = OTHER; note = 2'O-methyl-adenosine
  modified_base 6: mod_base = um
  modified_base 7: mod_base = OTHER; note = 2' Fluoro-guanosine
  modified_base 8: mod_base = um
  modified_base 9: mod_base = OTHER; note = 2' Fluoro-guanosine
  modified_base 10: mod_base = OTHER; note = 2' Fluoro-cytidine
  modified_base 11: mod_base = OTHER; note = 2' Fluoro-cytidine
  modified_base 12: mod_base = um
  modified_base 13: mod_base = um
  modified_base 14: mod_base = um
  modified_base 15: mod_base = um
  modified_base 16: mod_base = OTHER; note = 2'O-methyl-adenosine
  modified_base 17: mod_base = OTHER; note = 2'O-methyl-adenosine
  modified_base 18: mod_base = um
  modified_base 19: mod_base = um
  modified_base 20: mod_base = OTHER; note = 2'O-methyl-adenosine
  modified_base 21: mod_base = gm
  misc_feature 1^2: note = phosphorothioate linkage
  misc_feature 2^3: note = phosphorothioate linkage
atgaatgtgccttttaattag

SEQ ID NO: 543 - RNA, 21 nt, synthetic construct
  source 1..21: mol_type = other RNA
  misc_feature 1..21: note = Description: B4GALT1 siRNA sense strands (modified); Sense strand ID: ETXS1103; Underlying Base Sequence: SEQ ID NO: 370
  modified_base 1: mod_base = gm
  modified_base 2: mod_base = cm
  modified_base 3: mod_base = gm
  modified_base 4: mod_base = um
  modified_base 5: mod_base = cm
  modified_base 6: mod_base = um
  modified_base 7: mod_base = OTHER; note = 2' Fluoro-cytidine
  modified_base 8: mod_base = um
  modified_base 9: mod_base = OTHER; note = 2' Fluoro-cytidine
  modified_base 10: mod_base = OTHER; note = 2' Fluoro-cytidine
  modified_base 11: mod_base = OTHER; note = 2' Fluoro-guanosine
  modified_base 12: mod_base = cm
  modified_base 13: mod_base = OTHER; note = 2'O-methyl-adenosine
  modified_base 14: mod_base = cm
  modified_base 15: mod_base = OTHER; note = 2'O-methyl-adenosine
  modified_base 16: mod_base = OTHER; note = 2'O-methyl-adenosine
  modified_base 17: mod_base = gm
  modified_base 18: mod_base = gm
  modified_base 19: mod_base = um
  modified_base 20: mod_base = gm
  modified_base 21: mod_base = gm
  misc_feature 1^2: note = phosphorothioate linkage
  misc_feature 2^3: note = phosphorothioate linkage
gcgtctctcctcacaaggtgg

SEQ ID NO: 544 - RNA, 21 nt, synthetic construct
  source 1..21: mol_type = other RNA
  misc_feature 1..21: note = Description: B4GALT1 siRNA sense strands (modified); Sense strand ID: ETXS1105; Underlying Base Sequence: SEQ ID NO: 379
  modified_base 1: mod_base = OTHER; note = 2'O-methyl-adenosine
  modified_base 2: mod_base = um
  modified_base 3: mod_base = OTHER; note = 2'O-methyl-adenosine
  modified_base 4: mod_base = cm
  modified_base 5: mod_base = cm
  modified_base 6: mod_base = cm
  modified_base 7: mod_base = OTHER; note = 2'Fluoro-adenosine
  modified_base 8: mod_base = OTHER; note = 2'O-methyl-adenosine
  modified_base 9: mod_base = OTHER; note = 2'Fluoro-adenosine
  modified_base 10: mod_base = OTHER; note = 2' Fluoro-guanosine
  modified_base 11: mod_base = OTHER; note = 2' Fluoro-cytidine
  modified_base 12: mod_base = OTHER; note = 2'O-methyl-adenosine
  modified_base 13: mod_base = cm
  modified_base 14: mod_base = OTHER; note = 2'O-methyl-adenosine
  modified_base 15: mod_base = gm
  modified_base 16: mod_base = um
  modified_base 17: mod_base = gm
  modified_base 18: mod_base = gm
  modified_base 19: mod_base = OTHER; note = 2'O-methyl-adenosine
  modified_base 20: mod_base = cm
  modified_base 21: mod_base = OTHER; note = 2'O-methyl-adenosine
  misc_feature 1^2: note = phosphorothioate linkage
  misc_feature 2^3: note = phosphorothioate linkage
atacccaaatcacagtggaca

SEQ ID NO: 545 - RNA, 21 nt, synthetic construct
  source 1..21: mol_type = other RNA
  misc_feature 1..21: note = Description: B4GALT1 siRNA sense strands (modified); Sense strand ID: ETXS1107; Underlying Base Sequence: SEQ ID NO: 310
  modified_base 1: mod_base = um
  modified_base 2: mod_base = OTHER; note = 2'O-methyl-adenosine
  modified_base 3: mod_base = OTHER; note = 2'O-methyl-adenosine
  modified_base 4: mod_base = OTHER; note = 2'O-methyl-adenosine
  modified_base 5: mod_base = cm
  modified_base 6: mod_base = um
  modified_base 7: mod_base = OTHER; note = 2' Fluoro-guanosine
  modified_base 8: mod_base = gm
  modified_base 9: mod_base = OTHER; note = 2'Fluoro-adenosine
  modified_base 10: mod_base = OTHER; note = 2'Fluoro-adenosine
  modified_base 11: mod_base = OTHER; note = 2' Fluoro-guanosine
  modified_base 12: mod_base = um
  modified_base 13: mod_base = um
  modified_base 14: mod_base = cm
  modified_base 15: mod_base = cm
  modified_base 16: mod_base = um
  modified_base 17: mod_base = OTHER; note = 2'O-methyl-adenosine
  modified_base 18: mod_base = um
  modified_base 19: mod_base = gm
  modified_base 20: mod_base = um
  modified_base 21: mod_base = OTHER; note = 2'O-methyl-adenosine
  misc_feature 1^2: note = phosphorothioate linkage
  misc_feature 2^3: note = phosphorothioate linkage
taaacttgaatttcctatgta

SEQ ID NO: 546 - RNA, 21 nt, synthetic construct
  source 1..21: mol_type = other RNA
  misc_feature 1..21: note = Description: B4GALT1 siRNA sense strands (modified); Sense strand ID: ETXS1109; Underlying Base Sequence: SEQ ID NO: 333
  modified_base 1: mod_base = gm
  modified_base 2: mod_base = um
  modified_base 3: mod_base = cm
  modified_base 4: mod_base = um
  modified_base 5: mod_base = gm
  modified_base 6: mod_base = OTHER; note = 2'O-methyl-adenosine
  modified_base 7: mod_base = OTHER; note = 2' Fluoro-guanosine
  modified_base 8: mod_base = um
  modified_base 9: mod_base = OTHER; note = 2' Fluoro-guanosine
  modified_base 10: mod_base = OTHER; note = 2' Fluoro-cytidine
  modified_base 11: mod_base = OTHER; note = 2' Fluoro-guanosine
  modified_base 12: mod_base = gm
  modified_base 13: mod_base = OTHER; note = 2'O-methyl-adenosine
  modified_base 14: mod_base = OTHER; note = 2'O-methyl-adenosine
  modified_base 15: mod_base = um
  modified_base 16: mod_base = gm
  modified_base 17: mod_base = um
  modified_base 18: mod_base = OTHER; note = 2'O-methyl-adenosine
  modified_base 19: mod_base = OTHER; note = 2'O-methyl-adenosine
  modified_base 20: mod_base = OTHER; note = 2'O-methyl-adenosine
  modified_base 21: mod_base = gm
  misc_feature 1^2: note = phosphorothioate linkage
  misc_feature 2^3: note = phosphorothioate linkage
gtctgatttctgaatgtaaag

SEQ ID NO: 547 - RNA, 21 nt, synthetic construct
  source 1..21: mol_type = other RNA
  misc_feature 1..21: note = Description: B4GALT1 siRNA sense strands (modified); Sense strand ID: ETXS1111; Underlying Base Sequence: SEQ ID NO: 371
  modified_base 1: mod_base = gm
  modified_base 2: mod_base = gm
  modified_base 3: mod_base = OTHER; note = 2'O-methyl-adenosine
  modified_base 4: mod_base = um
  modified_base 5: mod_base = um
  modified_base 6: mod_base = um
  modified_base 7: mod_base = OTHER; note = 2' Fluoro-cytidine
  modified_base 8: mod_base = cm
  modified_base 9: mod_base = OTHER; note = 2' Fluoro-guanosine
  modified_base 10: mod_base = OTHER; note = 2'Fluoro-adenosine
  modified_base 11: mod_base = OTHER; note = 2'Fluoro-adenosine
  modified_base 12: mod_base = um
  modified_base 13: mod_base = OTHER; note = 2'O-methyl-adenosine
  modified_base 14: mod_base = OTHER; note = 2'O-methyl-adenosine
  modified_base 15: mod_base = um
  modified_base 16: mod_base = um
  modified_base 17: mod_base = OTHER; note = 2'O-methyl-adenosine
  modified_base 18: mod_base = um
  modified_base 19: mod_base = um
  modified_base 20: mod_base = gm
  modified_base 21: mod_base = gm
  misc_feature 1^2: note = phosphorothioate linkage
  misc_feature 2^3: note = phosphorothioate linkage
ggatttcctaataattattgg

SEQ ID NO: 548 - RNA, 21 nt, synthetic construct
  source 1..21: mol_type = other RNA
  misc_feature 1..21: note = Description: B4GALT1 siRNA sense strands (modified); Sense strand ID: ETXS1113; Underlying Base Sequence: SEQ ID NO: 380
  modified_base 1: mod_base = OTHER; note = 2'O-methyl-adenosine
  modified_base 2: mod_base = um
  modified_base 3: mod_base = um
  modified_base 4: mod_base = cm
  modified_base 5: mod_base = cm
  modified_base 6: mod_base = gm
  modified_base 7: mod_base = OTHER; note = 2' Fluoro-cytidine
  modified_base 8: mod_base = OTHER; note = 2'O-methyl-adenosine
  modified_base 9: mod_base = OTHER; note = 2'Fluoro-adenosine
  modified_base 10: mod_base = OTHER; note = 2' Fluoro-cytidine
  modified_base 11: mod_base = OTHER; note = 2' Fluoro-cytidine
  modified_base 12: mod_base = gm
  modified_base 13: mod_base = gm
  modified_base 14: mod_base = cm
  modified_base 15: mod_base = OTHER; note = 2'O-methyl-adenosine
  modified_base 16: mod_base = gm
  modified_base 17: mod_base = gm
  modified_base 18: mod_base = OTHER; note = 2'O-methyl-adenosine
  modified_base 19: mod_base = gm
  modified_base 20: mod_base = cm
  modified_base 21: mod_base = OTHER; note = 2'O-methyl-adenosine
  misc_feature 1^2: note = phosphorothioate linkage
  misc_feature 2^3: note = phosphorothioate linkage
attccgcaaccggcaggagca

SEQ ID NO: 549 - RNA, 21 nt, synthetic construct
  source 1..21: mol_type = other RNA
  misc_feature 1..21: note = Description: B4GALT1 siRNA sense strands (modified); Sense strand ID: ETXS1115; Underlying Base Sequence: SEQ ID NO: 353
  modified_base 1: mod_base = gm
  modified_base 2: mod_base = um
  modified_base 3: mod_base = cm
  modified_base 4: mod_base = um
  modified_base 5: mod_base = cm
  modified_base 6: mod_base = um
  modified_base 7: mod_base = OTHER; note = 2' Fluoro-guanosine
  modified_base 8: mod_base = cm
  modified_base 9: mod_base = OTHER; note = 2' Fluoro-guanosine
  modified_base 10: mod_base = OTHER; note = 2' Fluoro-cytidine
  modified_base 11: mod_base = OTHER; note = 2' Fluoro-guanosine
  modified_base 12: mod_base = OTHER; note = 2'O-methyl-adenosine
  modified_base 13: mod_base = OTHER; note = 2'O-methyl-adenosine
  modified_base 14: mod_base = gm
  modified_base 15: mod_base = um
  modified_base 16: mod_base = OTHER; note = 2'O-methyl-adenosine
  modified_base 17: mod_base = OTHER; note = 2'O-methyl-adenosine
  modified_base 18: mod_base = OTHER; note = 2'O-methyl-adenosine
  modified_base 19: mod_base = cm
  modified_base 20: mod_base = OTHER; note = 2'O-methyl-adenosine
  modified_base 21: mod_base = OTHER; note = 2'O-methyl-adenosine
  misc_feature 1^2: note = phosphorothioate linkage
  misc_feature 2^3: note = phosphorothioate linkage
gtctctgctctaagtaaacaa

SEQ ID NO: 550 - RNA, 21 nt, synthetic construct
  source 1..21: mol_type = other RNA
  misc_feature 1..21: note = Description: B4GALT1 siRNA sense strands (modified); Sense strand ID: ETXS1117; Underlying Base Sequence: SEQ ID NO: 365
  modified_base 1: mod_base = cm
  modified_base 2: mod_base = um
  modified_base 3: mod_base = gm
  modified_base 4: mod_base = cm
  modified_base 5: mod_base = um
  modified_base 6: mod_base = cm
  modified_base 7: mod_base = OTHER; note = 2' Fluoro-guanosine
  modified_base 8: mod_base = OTHER; note = 2'O-methyl-adenosine
  modified_base 9: mod_base = OTHER; note = 2'Fluoro-adenosine
  modified_base 10: mod_base = OTHER; note = 2' Fluoro-guanosine
  modified_base 11: mod_base = OTHER; note = 2' Fluoro-guanosine
  modified_base 12: mod_base = OTHER; note = 2'O-methyl-adenosine
  modified_base 13: mod_base = OTHER; note = 2'O-methyl-adenosine
  modified_base 14: mod_base = OTHER; note = 2'O-methyl-adenosine
  modified_base 15: mod_base = cm
  modified_base 16: mod_base = OTHER; note = 2'O-methyl-adenosine
  modified_base 17: mod_base = OTHER; note = 2'O-methyl-adenosine
  modified_base 18: mod_base = cm
  modified_base 19: mod_base = OTHER; note = 2'O-methyl-adenosine
  modified_base 20: mod_base = gm
  modified_base 21: mod_base = um
  misc_feature 1^2: note = phosphorothioate linkage
  misc_feature 2^3: note = phosphorothioate linkage
ctgctctaagtaaacaacagt

SEQ ID NO: 551 - RNA, 21 nt, synthetic construct
  source 1..21: mol_type = other RNA
  misc_feature 1..21: note = Description: B4GALT1 siRNA sense strands (modified); Sense strand ID: ETXS1119; Underlying Base Sequence: SEQ ID NO: 341
  modified_base 1: mod_base = um
  modified_base 2: mod_base = um
  modified_base 3: mod_base = um
  modified_base 4: mod_base = um
  modified_base 5: mod_base = cm
  modified_base 6: mod_base = cm
  modified_base 7: mod_base = OTHER; note = 2'Fluoro-adenosine
  modified_base 8: mod_base = OTHER; note = 2'O-methyl-adenosine
  modified_base 9: mod_base = OTHER; note = 2'Fluoro-adenosine
  modified_base 10: mod_base = OTHER; note = 2' Fluoro-guanosine
  modified_base 11: mod_base = OTHER; note = 2' Fluoro-guanosine
  modified_base 12: mod_base = gm
  modified_base 13: mod_base = cm
  modified_base 14: mod_base = cm
  modified_base 15: mod_base = um
  modified_base 16: mod_base = um
  modified_base 17: mod_base = OTHER; note = 2'O-methyl-adenosine
  modified_base 18: mod_base = OTHER; note = 2'O-methyl-adenosine
  modified_base 19: mod_base = OTHER; note = 2'O-methyl-adenosine
  modified_base 20: mod_base = OTHER; note = 2'O-methyl-adenosine
  modified_base 21: mod_base = gm
  misc_feature 1^2: note = phosphorothioate linkage
  misc_feature 2^3: note = phosphorothioate linkage
ttttccaaagtgccttaaaag

SEQ ID NO: 552 - RNA, 21 nt, synthetic construct
  source 1..21: mol_type = other RNA
  misc_feature 1..21: note = Description: B4GALT1 siRNA sense strands (modified); Sense strand ID: ETXS1121; Underlying Base Sequence: SEQ ID NO: 356
  modified_base 1: mod_base = um
  modified_base 2: mod_base = OTHER; note = 2'O-methyl-adenosine
  modified_base 3: mod_base = um
  modified_base 4: mod_base = gm
  modified_base 5: mod_base = um
  modified_base 6: mod_base = um
  modified_base 7: mod_base = OTHER; note = 2' Fluoro-cytidine
  modified_base 8: mod_base = OTHER; note = 2'O-methyl-adenosine
  modified_base 9: mod_base = OTHER; note = 2' Fluoro-guanosine
  modified_base 10: mod_base = OTHER; note = 2' Fluoro-guanosine
  modified_base 11: mod_base = OTHER; note = 2'Fluoro-adenosine
  modified_base 12: mod_base = um
  modified_base 13: mod_base = um
  modified_base 14: mod_base = um
  modified_base 15: mod_base = um
  modified_base 16: mod_base = gm
  modified_base 17: mod_base = gm
  modified_base 18: mod_base = OTHER; note = 2'O-methyl-adenosine
  modified_base 19: mod_base = gm
  modified_base 20: mod_base = gm
  modified_base 21: mod_base = um
  misc_feature 1^2: note = phosphorothioate linkage
  misc_feature 2^3: note = phosphorothioate linkage
tatgttcagtattttggaggt

SEQ ID NO: 553 - RNA, 21 nt, synthetic construct
  source 1..21: mol_type = other RNA
  misc_feature 1..21: note = Description: B4GALT1 siRNA sense strands (modified); Sense strand ID: ETXS1123; Underlying Base Sequence: SEQ ID NO: 390
  modified_base 1: mod_base = OTHER; note = 2'O-methyl-adenosine
  modified_base 2: mod_base = cm
  modified_base 3: mod_base = OTHER; note = 2'O-methyl-adenosine
  modified_base 4: mod_base = gm
  modified_base 5: mod_base = um
  modified_base 6: mod_base = gm
  modified_base 7: mod_base = OTHER; note = 2' Fluoro-guanosine
  modified_base 8: mod_base = OTHER; note = 2'O-methyl-adenosine
  modified_base 9: mod_base = OTHER; note = 2' Fluoro-cytidine
  modified_base 10: mod_base = OTHER; note = 2'Fluoro-adenosine
  modified_base 11: mod_base = OTHER; note = 2' Fluoro-guanosine
  modified_base 12: mod_base = cm
  modified_base 13: mod_base = gm
  modified_base 14: mod_base = gm
  modified_base 15: mod_base = gm
  modified_base 16: mod_base = OTHER; note = 2'O-methyl-adenosine
  modified_base 17: mod_base = cm
  modified_base 18: mod_base = OTHER; note = 2'O-methyl-adenosine
  modified_base 19: mod_base = cm
  modified_base 20: mod_base = cm
  modified_base 21: mod_base = gm
  misc_feature 1^2: note = phosphorothioate linkage
  misc_feature 2^3: note = phosphorothioate linkage
acagtggacatcgggacaccg

SEQ ID NO: 554 - RNA, 21 nt, synthetic construct
  source 1..21: mol_type = other RNA
  misc_feature 1..21: note = Description: B4GALT1 siRNA sense strands (modified); Sense strand ID: ETXS1125; Underlying Base Sequence: SEQ ID NO: 389
  modified_base 1: mod_base = OTHER; note = 2'O-methyl-adenosine
  modified_base 2: mod_base = um
  modified_base 3: mod_base = um
  modified_base 4: mod_base = um
  modified_base 5: mod_base = cm
  modified_base 6: mod_base = cm
  modified_base 7: mod_base = OTHER; note = 2' Fluoro-guanosine
  modified_base 8: mod_base = OTHER; note = 2'O-methyl-adenosine
  modified_base 9: mod_base = OTHER; note = 2'Fluoro-adenosine
  modified_base 10: mod_base = OTHER; note = 2' Fluoro-guanosine
  modified_base 11: mod_base = OTHER; note = 2'Fluoro-adenosine
  modified_base 12: mod_base = OTHER; note = 2'O-methyl-adenosine
  modified_base 13: mod_base = um
  modified_base 14: mod_base = um
  modified_base 15: mod_base = OTHER; note = 2'O-methyl-adenosine
  modified_base 16: mod_base = um
  modified_base 17: mod_base = um
  modified_base 18: mod_base = gm
  modified_base 19: mod_base = gm
  modified_base 20: mod_base = gm
  modified_base 21: mod_base = gm
  misc_feature 1^2: note = phosphorothioate linkage
  misc_feature 2^3: note = phosphorothioate linkage
atttcctaataattattgggg

SEQ ID NO: 555 - RNA, 21 nt, synthetic construct
  source 1..21: mol_type = other RNA
  misc_feature 1..21: note = Description: B4GALT1 siRNA sense strands (modified); Sense strand ID: ETXS1127; Underlying Base Sequence: SEQ ID NO: 388
  modified_base 1: mod_base = OTHER; note = 2'O-methyl-adenosine
  modified_base 2: mod_base = cm
  modified_base 3: mod_base = cm
  modified_base 4: mod_base = cm
  modified_base 5: mod_base = OTHER; note = 2'O-methyl-adenosine
  modified_base 6: mod_base = OTHER; note = 2'O-methyl-adenosine
  modified_base 7: mod_base = OTHER; note = 2'Fluoro-adenosine
  modified_base 8: mod_base = um
  modified_base 9: mod_base = OTHER; note = 2' Fluoro-cytidine
  modified_base 10: mod_base = OTHER; note = 2'Fluoro-adenosine
  modified_base 11: mod_base = OTHER; note = 2' Fluoro-cytidine
  modified_base 12: mod_base = OTHER; note = 2'O-methyl-adenosine
  modified_base 13: mod_base = gm
  modified_base 14: mod_base = um
  modified_base 15: mod_base = gm
  modified_base 16: mod_base = gm
  modified_base 17: mod_base = OTHER; note = 2'O-methyl-adenosine
  modified_base 18: mod_base = cm
  modified_base 19: mod_base = OTHER; note = 2'O-methyl-adenosine
  modified_base 20: mod_base = um
  modified_base 21: mod_base = cm
  misc_feature 1^2: note = phosphorothioate linkage
  misc_feature 2^3: note = phosphorothioate linkage
acccaaatcacagtggacatc

SEQ ID NO: 556 - RNA, 21 nt, synthetic construct
  source 1..21: mol_type = other RNA
  misc_feature 1..21: note = Description: B4GALT1 siRNA sense strands (modified); Sense strand ID: ETXS1129; Underlying Base Sequence: SEQ ID NO: 346
  modified_base 1: mod_base = um
  modified_base 2: mod_base = um
  modified_base 3: mod_base = um
  modified_base 4: mod_base = gm
  modified_base 5: mod_base = gm
  modified_base 6: mod_base = OTHER; note = 2'O-methyl-adenosine
  modified_base 7: mod_base = OTHER; note = 2' Fluoro-guanosine
  modified_base 8: mod_base = gm
  modified_base 9: mod_base = OTHER; note = 2' Fluoro-guanosine
  modified_base 10: mod_base = OTHER; note = 2' Fluoro-guanosine
  modified_base 11: mod_base = OTHER; note = 2' Fluoro-guanosine
  modified_base 12: mod_base = cm
  modified_base 13: mod_base = um
  modified_base 14: mod_base = cm
  modified_base 15: mod_base = um
  modified_base 16: mod_base = gm
  modified_base 17: mod_base = cm
  modified_base 18: mod_base = um
  modified_base 19: mod_base = cm
  modified_base 20: mod_base = um
  modified_base 21: mod_base = OTHER; note = 2'O-methyl-adenosine
  misc_feature 1^2: note = phosphorothioate linkage
  misc_feature 2^3: note = phosphorothioate linkage
tttggaggtgtctctgctcta

SEQ ID NO: 557 - RNA, 21 nt, synthetic construct
  source 1..21: mol_type = other RNA
  misc_feature 1..21: note = Description: B4GALT1 siRNA sense strands (modified); Sense strand ID: ETXS1131; Underlying Base Sequence: SEQ ID NO: 364
  modified_base 1: mod_base = cm
  modified_base 2: mod_base = cm
  modified_base 3: mod_base = OTHER; note = 2'O-methyl-adenosine
  modified_base 4: mod_base = OTHER; note = 2'O-methyl-adenosine
  modified_base 5: mod_base = OTHER; note = 2'O-methyl-adenosine
  modified_base 6: mod_base = um
  modified_base 7: mod_base = OTHER; note = 2' Fluoro-cytidine
  modified_base 8: mod_base = OTHER; note = 2'O-methyl-adenosine
  modified_base 9: mod_base = OTHER; note = 2' Fluoro-cytidine
  modified_base 10: mod_base = OTHER; note = 2'Fluoro-adenosine
  modified_base 11: mod_base = OTHER; note = 2' Fluoro-guanosine
  modified_base 12: mod_base = um
  modified_base 13: mod_base = gm
  modified_base 14: mod_base = gm
  modified_base 15: mod_base = OTHER; note = 2'O-methyl-adenosine
  modified_base 16: mod_base = cm
  modified_base 17: mod_base = OTHER; note = 2'O-methyl-adenosine
  modified_base 18: mod_base = um
  modified_base 19: mod_base = cm
  modified_base 20: mod_base = gm
  modified_base 21: mod_base = gm
  misc_feature 1^2: note = phosphorothioate linkage
  misc_feature 2^3: note = phosphorothioate linkage
ccaaatcacagtggacatcgg

SEQ ID NO: 558 - RNA, 21 nt, synthetic construct
  source 1..21: mol_type = other RNA
  misc_feature 1..21: note = Description: B4GALT1 siRNA sense strands (modified); Sense strand ID: ETXS1133; Underlying Base Sequence: SEQ ID NO: 367
  modified_base 1: mod_base = um
  modified_base 2: mod_base = um
  modified_base 3: mod_base = um
  modified_base 4: mod_base = cm
  modified_base 5: mod_base = cm
  modified_base 6: mod_base = OTHER; note = 2'O-methyl-adenosine
  modified_base 7: mod_base = OTHER; note = 2'Fluoro-adenosine
  modified_base 8: mod_base = OTHER; note = 2'O-methyl-adenosine
  modified_base 9: mod_base = OTHER; note = 2' Fluoro-guanosine
  modified_base 10: mod_base = OTHER; note = 2' Fluoro-guanosine
  modified_base 11: mod_base = OTHER; note = 2' Fluoro-guanosine
  modified_base 12: mod_base = cm
  modified_base 13: mod_base = cm
  modified_base 14: mod_base = um
  modified_base 15: mod_base = um
  modified_base 16: mod_base = OTHER; note = 2'O-methyl-adenosine
  modified_base 17: mod_base = OTHER; note = 2'O-methyl-adenosine
  modified_base 18: mod_base = OTHER; note = 2'O-methyl-adenosine
  modified_base 19: mod_base = OTHER; note = 2'O-methyl-adenosine
  modified_base 20: mod_base = gm
  modified_base 21: mod_base = OTHER; note = 2'O-methyl-adenosine
  misc_feature 1^2: note = phosphorothioate linkage
  misc_feature 2^3: note = phosphorothioate linkage
tttccaaagtgccttaaaaga

SEQ ID NO: 559 - RNA, 21 nt, synthetic construct
  source 1..21: mol_type = other RNA
  misc_feature 1..21: note = Description: B4GALT1 siRNA sense strands (modified); Sense strand ID: ETXS1135; Underlying Base Sequence: SEQ ID NO: 335
  modified_base 1: mod_base = gm
  modified_base 2: mod_base = OTHER; note = 2'O-methyl-adenosine
  modified_base 3: mod_base = um
  modified_base 4: mod_base = um
  modified_base 5: mod_base = um
  modified_base 6: mod_base = cm
  modified_base 7: mod_base = OTHER; note = 2' Fluoro-cytidine
  modified_base 8: mod_base = um
  modified_base 9: mod_base = OTHER; note = 2'Fluoro-adenosine
  modified_base 10: mod_base = OTHER; note = 2'Fluoro-adenosine
  modified_base 11: mod_base = OTHER; note = 2' Fluoro-guanosine
  modified_base 12: mod_base = OTHER; note = 2'O-methyl-adenosine
  modified_base 13: mod_base = OTHER; note = 2'O-methyl-adenosine
  modified_base 14: mod_base = um
  modified_base 15: mod_base = um
  modified_base 16: mod_base = OTHER; note = 2'O-methyl-adenosine
  modified_base 17: mod_base = um
  modified_base 18: mod_base = um
  modified_base 19: mod_base = gm
  modified_base 20: mod_base = gm
  modified_base 21: mod_base = gm
  misc_feature 1^2: note = phosphorothioate linkage
  misc_feature 2^3: note = phosphorothioate linkage
gatttcctaataattattggg

SEQ ID NO: 560 - RNA, 21 nt, synthetic construct
  source 1..21: mol_type = other RNA
  misc_feature 1..21: note = Description: B4GALT1 siRNA sense strands (modified); Sense strand ID: ETXS1137; Underlying Base Sequence: SEQ ID NO: 373
  modified_base 1: mod_base = um
  modified_base 2: mod_base = OTHER; note = 2'O-methyl-adenosine
  modified_base 3: mod_base = um
  modified_base 4: mod_base = OTHER; note = 2'O-methyl-adenosine
  modified_base 5: mod_base = cm
  modified_base 6: mod_base = cm
  modified_base 7: mod_base = OTHER; note = 2' Fluoro-cytidine
  modified_base 8: mod_base = OTHER; note = 2'O-methyl-adenosine
  modified_base 9: mod_base = OTHER; note = 2'Fluoro-adenosine
  modified_base 10: mod_base = OTHER; note = 2'Fluoro-adenosine
  modified_base 11: mod_base = OTHER; note = 2' Fluoro-guanosine
  modified_base 12: mod_base = cm
  modified_base 13: mod_base = OTHER; note = 2'O-methyl-adenosine
  modified_base 14: mod_base = cm
  modified_base 15: mod_base = OTHER; note = 2'O-methyl-adenosine
  modified_base 16: mod_base = gm
  modified_base 17: mod_base = um
  modified_base 18: mod_base = gm
  modified_base 19: mod_base = gm
  modified_base 20: mod_base = OTHER; note = 2'O-methyl-adenosine
  modified_base 21: mod_base = cm
  misc_feature 1^2: note = phosphorothioate linkage
  misc_feature 2^3: note = phosphorothioate linkage
tatacccaaatcacagtggac

SEQ ID NO: 561 - RNA, 21 nt, synthetic construct
  source 1..21: mol_type = other RNA
  misc_feature 1..21: note = Description: B4GALT1 siRNA sense strands (modified); Sense strand ID: ETXS1139; Underlying Base Sequence: SEQ ID NO: 345
  modified_base 1: mod_base = gm
  modified_base 2: mod_base = gm
  modified_base 3: mod_base = um
  modified_base 4: mod_base = um
  modified_base 5: mod_base = um
  modified_base 6: mod_base = gm
  modified_base 7: mod_base = OTHER; note = 2'Fluoro-adenosine
  modified_base 8: mod_base = OTHER; note = 2'O-methyl-adenosine
  modified_base 9: mod_base = OTHER; note = 2' Fluoro-cytidine
  modified_base 10: mod_base = OTHER; note = 2' Fluoro-guanosine
  modified_base 11: mod_base = OTHER; note = 2' Fluoro-cytidine
  modified_base 12: mod_base = OTHER; note = 2'O-methyl-adenosine
  modified_base 13: mod_base = cm
  modified_base 14: mod_base = um
  modified_base 15: mod_base = cm
  modified_base 16: mod_base = OTHER; note = 2'O-methyl-adenosine
  modified_base 17: mod_base = cm
  modified_base 18: mod_base = cm
  modified_base 19: mod_base = um
  modified_base 20: mod_base = OTHER; note = 2'O-methyl-adenosine
  modified_base 21: mod_base = cm
  misc_feature 1^2: note = phosphorothioate linkage
  misc_feature 2^3: note = phosphorothioate linkage
ggtttgaactcactcacctac

SEQ ID NO: 562 - RNA, 21 nt, synthetic construct
  source 1..21: mol_type = other RNA
  misc_feature 1..21: note = Description: B4GALT1 siRNA sense strands (modified); Sense strand ID: ETXS1141; Underlying Base Sequence: SEQ ID NO: 332
  modified_base 1: mod_base = gm
  modified_base 2: mod_base = gm
  modified_base 3: mod_base = OTHER; note = 2'O-methyl-adenosine
  modified_base 4: mod_base = gm
  modified_base 5: mod_base = gm
  modified_base 6: mod_base = um
  modified_base 7: mod_base = OTHER; note = 2' Fluoro-guanosine
  modified_base 8: mod_base = um
  modified_base 9: mod_base = OTHER; note = 2' Fluoro-cytidine
  modified_base 10: mod_base = OTHER; note = 2' Fluoro-guanosine
  modified_base 11: mod_base = OTHER; note = 2' Fluoro-cytidine
  modified_base 12: mod_base = um
  modified_base 13: mod_base = gm
  modified_base 14: mod_base = cm
  modified_base 15: mod_base = um
  modified_base 16: mod_base = cm
  modified_base 17: mod_base = um
  modified_base 18: mod_base = OTHER; note = 2'O-methyl-adenosine
  modified_base 19: mod_base = OTHER; note = 2'O-methyl-adenosine
  modified_base 20: mod_base = gm
  modified_base 21: mod_base = um
  misc_feature 1^2: note = phosphorothioate linkage
  misc_feature 2^3: note = phosphorothioate linkage
ggaggtgtctctgctctaagt

SEQ ID NO: 563 - RNA, 21 nt, synthetic construct
  source 1..21: mol_type = other RNA
  misc_feature 1..21: note = Description: B4GALT1 siRNA sense strands (modified); Sense strand ID: ETXS1143; Underlying Base Sequence: SEQ ID NO: 401
  modified_base 1: mod_base = um
  modified_base 2: mod_base = gm
  modified_base 3: mod_base = cm
  modified_base 4: mod_base = gm
  modified_base 5: mod_base = um
  modified_base 6: mod_base = cm
  modified_base 7: mod_base = OTHER; note = 2' Fluoro-guanosine
  modified_base 8: mod_base = cm
  modified_base 9: mod_base = OTHER; note = 2' Fluoro-guanosine
  modified_base 10: mod_base = OTHER; note = 2' Fluoro-cytidine
  modified_base 11: mod_base = OTHER; note = 2' Fluoro-cytidine
  modified_base 12: mod_base = um
  modified_base 13: mod_base = cm
  modified_base 14: mod_base = OTHER; note = 2'O-methyl-adenosine
  modified_base 15: mod_base = cm
  modified_base 16: mod_base = OTHER; note = 2'O-methyl-adenosine
  modified_base 17: mod_base = OTHER; note = 2'O-methyl-adenosine
  modified_base 18: mod_base = gm
  modified_base 19: mod_base = gm
  modified_base 20: mod_base = um
  modified_base 21: mod_base = gm
  misc_feature 1^2: note = phosphorothioate linkage
  misc_feature 2^3: note = phosphorothioate linkage
tgcgtctctcctcacaaggtg

SEQ ID NO: 564 - RNA, 21 nt, synthetic construct
  source 1..21: mol_type = other RNA
  misc_feature 1..21: note = Description: B4GALT1 siRNA sense strands (modified); Sense strand ID: ETXS1145; Underlying Base Sequence: SEQ ID NO: 331
  modified_base 1: mod_base = OTHER; note = 2'O-methyl-adenosine
  modified_base 2: mod_base = gm
  modified_base 3: mod_base = gm
  modified_base 4: mod_base = OTHER; note = 2'O-methyl-adenosine
  modified_base 5: mod_base = gm
  modified_base 6: mod_base = OTHER; note = 2'O-methyl-adenosine
  modified_base 7: mod_base = OTHER; note = 2'Fluoro-adenosine
  modified_base 8: mod_base = gm
  modified_base 9: mod_base = OTHER; note = 2'Fluoro-adenosine
  modified_base 10: mod_base = OTHER; note = 2' Fluoro-guanosine
  modified_base 11: mod_base = OTHER; note = 2' Fluoro-guanosine
  modified_base 12: mod_base = OTHER; note = 2'O-methyl-adenosine
  modified_base 13: mod_base = um
  modified_base 14: mod_base = gm
  modified_base 15: mod_base = OTHER; note = 2'O-methyl-adenosine
  modified_base 16: mod_base = cm
  modified_base 17: mod_base = OTHER; note = 2'O-methyl-adenosine
  modified_base 18: mod_base = um
  modified_base 19: mod_base = um
  modified_base 20: mod_base = um
  modified_base 21: mod_base = um
  misc_feature 1^2: note = phosphorothioate linkage
  misc_feature 2^3: note = phosphorothioate linkage
aggagaagatgatgacatttt

SEQ ID NO: 565 - RNA, 21 nt, synthetic construct
  source 1..21: mol_type = other RNA
  misc_feature 1..21: note = Description: B4GALT1 siRNA sense strands (modified); Sense strand ID: ETXS1147; Underlying Base Sequence: SEQ ID NO: 366
  modified_base 1: mod_base = um
  modified_base 2: mod_base = gm
  modified_base 3: mod_base = gm
  modified_base 4: mod_base = OTHER; note = 2'O-methyl-adenosine
  modified_base 5: mod_base = gm
  modified_base 6: mod_base = gm
  modified_base 7: mod_base = OTHER; note = 2' Fluoro-guanosine
  modified_base 8: mod_base = gm
  modified_base 9: mod_base = OTHER; note = 2' Fluoro-guanosine
  modified_base 10: mod_base = OTHER; note = 2' Fluoro-cytidine
  modified_base 11: mod_base = OTHER; note = 2' Fluoro-guanosine
  modified_base 12: mod_base = cm
  modified_base 13: mod_base = um
  modified_base 14: mod_base = gm
  modified_base 15: mod_base = cm
  modified_base 16: mod_base = um
  modified_base 17: mod_base = cm
  modified_base 18: mod_base = um
  modified_base 19: mod_base = OTHER; note = 2'O-methyl-adenosine
  modified_base 20: mod_base = OTHER; note = 2'O-methyl-adenosine
  modified_base 21: mod_base = gm
  misc_feature 1^2: note = phosphorothioate linkage
  misc_feature 2^3: note = phosphorothioate linkage
tggaggtgtctctgctctaag

SEQ ID NO: 566 - RNA, 21 nt, synthetic construct
  source 1..21: mol_type = other RNA
  misc_feature 1..21: note = Description: B4GALT1 siRNA sense strands (modified); Sense strand ID: ETXS1149; Underlying Base Sequence: SEQ ID NO: 376
  modified_base 1: mod_base = um
  modified_base 2: mod_base = um
  modified_base 3: mod_base = OTHER; note = 2'O-methyl-adenosine
  modified_base 4: mod_base = um
  modified_base 5: mod_base = um
  modified_base 6: mod_base = gm
  modified_base 7: mod_base = OTHER; note = 2' Fluoro-guanosine
  modified_base 8: mod_base = gm
  modified_base 9: mod_base = OTHER; note = 2' Fluoro-guanosine
  modified_base 10: mod_base = OTHER; note = 2' Fluoro-cytidine
  modified_base 11: mod_base = OTHER; note = 2' Fluoro-guanosine
  modified_base 12: mod_base = gm
  modified_base 13: mod_base = gm
  modified_base 14: mod_base = gm
  modified_base 15: mod_base = gm
  modified_base 16: mod_base = OTHER; note = 2'O-methyl-adenosine
  modified_base 17: mod_base = gm
  modified_base 18: mod_base = gm
  modified_base 19: mod_base = OTHER; note = 2'O-methyl-adenosine
  modified_base 20: mod_base = gm
  modified_base 21: mod_base = OTHER; note = 2'O-methyl-adenosine
  misc_feature 1^2: note = phosphorothioate linkage
  misc_feature 2^3: note = phosphorothioate linkage
ttattggggctggggaggaga

SEQ ID NO: 567 - RNA, 21 nt, synthetic construct
  source 1..21: mol_type = other RNA
  misc_feature 1..21: note = Description: B4GALT1 siRNA sense strands (modified); Sense strand ID: ETXS1151; Underlying Base Sequence: SEQ ID NO: 343
  modified_base 1: mod_base = cm
  modified_base 2: mod_base = cm
  modified_base 3: mod_base = um
  modified_base 4: mod_base = gm
  modified_base 5: mod_base = OTHER; note = 2'O-methyl-adenosine
  modified_base 6: mod_base = cm
  modified_base 7: mod_base = OTHER; note = 2' Fluoro-guanosine
  modified_base 8: mod_base = um
  modified_base 9: mod_base = OTHER; note = 2' Fluoro-guanosine
  modified_base 10: mod_base = OTHER; note = 2' Fluoro-guanosine
  modified_base 11: mod_base = OTHER; note = 2' Fluoro-cytidine
  modified_base 12: mod_base = cm
  modified_base 13: mod_base = OTHER; note = 2'O-methyl-adenosine
  modified_base 14: mod_base = OTHER; note = 2'O-methyl-adenosine
  modified_base 15: mod_base = OTHER; note = 2'O-methyl-adenosine
  modified_base 16: mod_base = gm
  modified_base 17: mod_base = um
  modified_base 18: mod_base = gm
  modified_base 19: mod_base = cm
  modified_base 20: mod_base = cm
  modified_base 21: mod_base = um
  misc_feature 1^2: note = phosphorothioate linkage
  misc_feature 2^3: note = phosphorothioate linkage
cctgacttttccaaagtgcct

SEQ ID NO: 568 - RNA, 21 nt, synthetic construct
  source 1..21: mol_type = other RNA
  misc_feature 1..21: note = Description: B4GALT1 siRNA sense strands (modified); Sense strand ID: ETXS1153; Underlying Base Sequence: SEQ ID NO: 372
  modified_base 1: mod_base = gm
  modified_base 2: mod_base = gm
  modified_base 3: mod_base = cm
  modified_base 4: mod_base = OTHER; note = 2'O-methyl-adenosine
  modified_base 5: mod_base = cm
  modified_base 6: mod_base = OTHER; note = 2'O-methyl-adenosine
  modified_base 7: mod_base = OTHER; note = 2' Fluoro-guanosine
  modified_base 8: mod_base = um
  modified_base 9: mod_base = OTHER; note = 2' Fluoro-guanosine
  modified_base 10: mod_base = OTHER; note = 2' Fluoro-cytidine
  modified_base 11: mod_base = OTHER; note = 2' Fluoro-cytidine
  modified_base 12: mod_base = gm
  modified_base 13: mod_base = um
  modified_base 14: mod_base = um
  modified_base 15: mod_base = gm
  modified_base 16: mod_base = cm
  modified_base 17: mod_base = OTHER; note = 2'O-methyl-adenosine
  modified_base 18: mod_base = OTHER; note = 2'O-methyl-adenosine
  modified_base 19: mod_base = um
  modified_base 20: mod_base = gm
  modified_base 21: mod_base = gm
  misc_feature 1^2: note = phosphorothioate linkage
  misc_feature 2^3: note = phosphorothioate linkage
ggcacatttccgttgcaatgg

SEQ ID NO: 569 - RNA, 21 nt, synthetic construct
  source 1..21: mol_type = other RNA
  misc_feature 1..21: note = Description: B4GALT1 siRNA sense strands (modified); Sense strand ID: ETXS1155; Underlying Base Sequence: SEQ ID NO: 321
  modified_base 1: mod_base = um
  modified_base 2: mod_base = gm
  modified_base 3: mod_base = cm
  modified_base 4: mod_base = um
  modified_base 5: mod_base = cm
  modified_base 6: mod_base = um
  modified_base 7: mod_base = OTHER; note = 2'Fluoro-adenosine
  modified_base 8: mod_base = OTHER; note = 2'O-methyl-adenosine
  modified_base 9: mod_base = OTHER; note = 2' Fluoro-guanosine
  modified_base 10: mod_base = OTHER; note = 2' Fluoro-guanosine
  modified_base 11: mod_base = OTHER; note = 2'Fluoro-adenosine
  modified_base 12: mod_base = OTHER; note = 2'O-methyl-adenosine
  modified_base 13: mod_base = OTHER; note = 2'O-methyl-adenosine
  modified_base 14: mod_base = cm
  modified_base 15: mod_base = OTHER; note = 2'O-methyl-adenosine
  modified_base 16: mod_base = OTHER; note = 2'O-methyl-adenosine
  modified_base 17: mod_base = cm
  modified_base 18: mod_base = OTHER; note = 2'O-methyl-adenosine
  modified_base 19: mod_base = gm
  modified_base 20: mod_base = um
  modified_base 21: mod_base = um
  misc_feature 1^2: note = phosphorothioate linkage
  misc_feature 2^3: note = phosphorothioate linkage
tgctctaagtaaacaacagtt

SEQ ID NO: 570 - RNA, 21 nt, synthetic construct
  source 1..21: mol_type = other RNA
  misc_feature 1..21: note = Description: B4GALT1 siRNA sense strands (modified); Sense strand ID: ETXS1157; Underlying Base Sequence: SEQ ID NO: 314
  modified_base 1: mod_base = um
  modified_base 2: mod_base = um
  modified_base 3: mod_base = gm
  modified_base 4: mod_base = gm
  modified_base 5: mod_base = OTHER; note = 2'O-methyl-adenosine
  modified_base 6: mod_base = gm
  modified_base 7: mod_base = OTHER; note = 2' Fluoro-guanosine
  modified_base 8: mod_base = um
  modified_base 9: mod_base = OTHER; note = 2' Fluoro-guanosine
  modified_base 10: mod_base = OTHER; note = 2' Fluoro-guanosine
  modified_base 11: mod_base = OTHER; note = 2' Fluoro-cytidine
  modified_base 12: mod_base = um
  modified_base 13: mod_base = cm
  modified_base 14: mod_base = um
  modified_base 15: mod_base = gm
  modified_base 16: mod_base = cm
  modified_base 17: mod_base = um
  modified_base 18: mod_base = cm
  modified_base 19: mod_base = um
  modified_base 20: mod_base = OTHER; note = 2'O-methyl-adenosine
  modified_base 21: mod_base = OTHER; note = 2'O-methyl-adenosine
  misc_feature 1^2: note = phosphorothioate linkage
  misc_feature 2^3: note = phosphorothioate linkage
ttggaggtgtctctgctctaa

SEQ ID NO: 571 - RNA, 21 nt, synthetic construct
  source 1..21: mol_type = other RNA
  misc_feature 1..21: note = Description: B4GALT1 siRNA sense strands (modified); Sense strand ID: ETXS1159; Underlying Base Sequence: SEQ ID NO: 318
  modified_base 1: mod_base = um
  modified_base 2: mod_base = gm
  modified_base 3: mod_base = cm
  modified_base 4: mod_base = um
  modified_base 5: mod_base = OTHER; note = 2'O-methyl-adenosine
  modified_base 6: mod_base = um
  modified_base 7: mod_base = OTHER; note = 2' Fluoro-guanosine
  modified_base 8: mod_base = um
  modified_base 9: mod_base = OTHER; note = 2'Fluoro-adenosine
  modified_base 10: mod_base = OTHER; note = 2'Fluoro-adenosine
  modified_base 11: mod_base = OTHER; note = 2'Fluoro-adenosine
  modified_base 12: mod_base = cm
  modified_base 13: mod_base = um
  modified_base 14: mod_base = um
  modified_base 15: mod_base = gm
  modified_base 16: mod_base = OTHER; note = 2'O-methyl-adenosine
  modified_base 17: mod_base = OTHER; note = 2'O-methyl-adenosine
  modified_base 18: mod_base = um
  modified_base 19: mod_base = um
  modified_base 20: mod_base = um
  modified_base 21: mod_base = cm
  misc_feature 1^2: note = phosphorothioate linkage
  misc_feature 2^3: note = phosphorothioate linkage
tgctatgtaaacttgaatttc

SEQ ID NO: 572 - RNA, 21 nt, synthetic construct
  source 1..21: mol_type = other RNA
  misc_feature 1..21: note = Description: B4GALT1 siRNA sense strands (modified); Sense strand ID: ETXS1161; Underlying Base Sequence: SEQ ID NO: 357
  modified_base 1: mod_base = um
  modified_base 2: mod_base = gm
  modified_base 3: mod_base = gm
  modified_base 4: mod_base = OTHER; note = 2'O-methyl-adenosine
  modified_base 5: mod_base = um
  modified_base 6: mod_base = um
  modified_base 7: mod_base = OTHER; note = 2' Fluoro-guanosine
  modified_base 8: mod_base = cm
  modified_base 9: mod_base = OTHER; note = 2' Fluoro-cytidine
  modified_base 10: mod_base = OTHER; note = 2' Fluoro-guanosine
  modified_base 11: mod_base = OTHER; note = 2'Fluoro-adenosine
  modified_base 12: mod_base = OTHER; note = 2'O-methyl-adenosine
  modified_base 13: mod_base = um
  modified_base 14: mod_base = OTHER; note = 2'O-methyl-adenosine
  modified_base 15: mod_base = OTHER; note = 2'O-methyl-adenosine
  modified_base 16: mod_base = um
  modified_base 17: mod_base = um
  modified_base 18: mod_base = OTHER; note = 2'O-methyl-adenosine
  modified_base 19: mod_base = um
  modified_base 20: mod_base = um
  modified_base 21: mod_base = gm
  misc_feature 1^2: note = phosphorothioate linkage
  misc_feature 2^3: note = phosphorothioate linkage
tggatttcctaataattattg

SEQ ID NO: 573 - RNA, 21 nt, synthetic construct
  source 1..21: mol_type = other RNA
  misc_feature 1..21: note = Description: B4GALT1 siRNA sense strands (modified); Sense strand ID: ETXS1163; Underlying Base Sequence: SEQ ID NO: 396
  modified_base 1: mod_base = OTHER; note = 2'O-methyl-adenosine
  modified_base 2: mod_base = um
  modified_base 3: mod_base = um
  modified_base 4: mod_base = OTHER; note = 2'O-methyl-adenosine
  modified_base 5: mod_base = um
  modified_base 6: mod_base = um
  modified_base 7: mod_base = OTHER; note = 2' Fluoro-guanosine
  modified_base 8: mod_base = gm
  modified_base 9: mod_base = OTHER; note = 2' Fluoro-guanosine
  modified_base 10: mod_base = OTHER; note = 2' Fluoro-guanosine
  modified_base 11: mod_base = OTHER; note = 2' Fluoro-cytidine
  modified_base 12: mod_base = um
  modified_base 13: mod_base = gm
  modified_base 14: mod_base = gm
  modified_base 15: mod_base = gm
  modified_base 16: mod_base = gm
  modified_base 17: mod_base = OTHER; note = 2'O-methyl-adenosine
  modified_base 18: mod_base = gm
  modified_base 19: mod_base = gm
  modified_base 20: mod_base = OTHER; note = 2'O-methyl-adenosine
  modified_base 21: mod_base = gm
  misc_feature 1^2: note = phosphorothioate linkage
  misc_feature 2^3: note = phosphorothioate linkage
attattggggctggggaggag

SEQ ID NO: 574 - RNA, 21 nt, synthetic construct
  source 1..21: mol_type = other RNA
  misc_feature 1..21: note = Description: B4GALT1 siRNA sense strands (modified); Sense strand ID: ETXS1165; Underlying Base Sequence: SEQ ID NO: 317
  modified_base 1: mod_base = cm
  modified_base 2: mod_base = um
  modified_base 3: mod_base = um
  modified_base 4: mod_base = um
  modified_base 5: mod_base = um
  modified_base 6: mod_base = cm
  modified_base 7: mod_base = OTHER; note = 2' Fluoro-cytidine
  modified_base 8: mod_base = OTHER; note = 2'O-methyl-adenosine
  modified_base 9: mod_base = OTHER; note = 2'Fluoro-adenosine
  modified_base 10: mod_base = OTHER; note = 2'Fluoro-adenosine
  modified_base 11: mod_base = OTHER; note = 2' Fluoro-guanosine
  modified_base 12: mod_base = um
  modified_base 13: mod_base = gm
  modified_base 14: mod_base = cm
  modified_base 15: mod_base = cm
  modified_base 16: mod_base = um
  modified_base 17: mod_base = um
  modified_base 18: mod_base = OTHER; note = 2'O-methyl-adenosine
  modified_base 19: mod_base = OTHER; note = 2'O-methyl-adenosine
  modified_base 20: mod_base = OTHER; note = 2'O-methyl-adenosine
  modified_base 21: mod_base = OTHER; note = 2'O-methyl-adenosine
  misc_feature 1^2: note = phosphorothioate linkage
  misc_feature 2^3: note = phosphorothioate linkage
cttttccaaagtgccttaaaa

SEQ ID NO: 575 - RNA, 21 nt, synthetic construct
  source 1..21: mol_type = other RNA
  misc_feature 1..21: note = Description: B4GALT1 siRNA sense strands (modified); Sense strand ID: ETXS1167; Underlying Base Sequence: SEQ ID NO: 386
  modified_base 1: mod_base = um
  modified_base 2: mod_base = OTHER; note = 2'O-methyl-adenosine
  modified_base 3: mod_base = um
  modified_base 4: mod_base = um
  modified_base 5: mod_base = gm
  modified_base 6: mod_base = gm
  modified_base 7: mod_base = OTHER; note = 2' Fluoro-guanosine
  modified_base 8: mod_base = gm
  modified_base 9: mod_base = OTHER; note = 2' Fluoro-cytidine
  modified_base 10: mod_base = OTHER; note = 2' Fluoro-guanosine
  modified_base 11: mod_base = OTHER; note = 2' Fluoro-guanosine
  modified_base 12: mod_base = gm
  modified_base 13: mod_base = gm
  modified_base 14: mod_base = gm
  modified_base 15: mod_base = OTHER; note = 2'O-methyl-adenosine
  modified_base 16: mod_base = gm
  modified_base 17: mod_base = gm
  modified_base 18: mod_base = OTHER; note = 2'O-methyl-adenosine
  modified_base 19: mod_base = gm
  modified_base 20: mod_base = OTHER; note = 2'O-methyl-adenosine
  modified_base 21: mod_base = OTHER; note = 2'O-methyl-adenosine
  misc_feature 1^2: note = phosphorothioate linkage
  misc_feature 2^3: note = phosphorothioate linkage
tattggggctggggaggagaa

SEQ ID NO: 576 - RNA, 21 nt, synthetic construct
  source 1..21: mol_type = other RNA
  misc_feature 1..21: note = Description: B4GALT1 siRNA sense strands (modified); Sense strand ID: ETXS1169; Underlying Base Sequence: SEQ ID NO: 394
  modified_base 1: mod_base = gm
  modified_base 2: mod_base = OTHER; note = 2'O-methyl-adenosine
  modified_base 3: mod_base = cm
  modified_base 4: mod_base = OTHER; note = 2'O-methyl-adenosine
  modified_base 5: mod_base = um
  modified_base 6: mod_base = cm
  modified_base 7: mod_base = OTHER; note = 2' Fluoro-guanosine
  modified_base 8: mod_base = gm
  modified_base 9: mod_base = OTHER; note = 2' Fluoro-guanosine
  modified_base 10: mod_base = OTHER; note = 2'Fluoro-adenosine
  modified_base 11: mod_base = OTHER; note = 2' Fluoro-cytidine
  modified_base 12: mod_base = OTHER; note = 2'O-methyl-adenosine
  modified_base 13: mod_base = cm
  modified_base 14: mod_base = cm
  modified_base 15: mod_base = gm
  modified_base 16: mod_base = OTHER; note = 2'O-methyl-adenosine
  modified_base 17: mod_base = gm
  modified_base 18: mod_base = cm
  modified_base 19: mod_base = um
  modified_base 20: mod_base = OTHER; note = 2'O-methyl-adenosine
  modified_base 21: mod_base = gm
  misc_feature 1^2: note = phosphorothioate linkage
  misc_feature 2^3: note = phosphorothioate linkage
gacatcgggacaccgagctag

SEQ ID NO: 577 - RNA, 21 nt, synthetic construct
  source 1..21: mol_type = other RNA
  misc_feature 1..21: note = Description: B4GALT1 siRNA sense strands (modified); Sense strand ID: ETXS1171; Underlying Base Sequence: SEQ ID NO: 336
  modified_base 1: mod_base = um
  modified_base 2: mod_base = um
  modified_base 3: mod_base = cm
  modified_base 4: mod_base = OTHER; note = 2'O-methyl-adenosine
  modified_base 5: mod_base = gm
  modified_base 6: mod_base = um
  modified_base 7: mod_base = OTHER; note = 2'Fluoro-adenosine
  modified_base 8: mod_base = um
  modified_base 9: mod_base = OTHER; note = 2' Fluoro-guanosine
  modified_base 10: mod_base = OTHER; note = 2' Fluoro-guanosine
  modified_base 11: mod_base = OTHER; note = 2' Fluoro-guanosine
  modified_base 12: mod_base = gm
  modified_base 13: mod_base = gm
  modified_base 14: mod_base = OTHER; note = 2'O-methyl-adenosine
  modified_base 15: mod_base = gm
  modified_base 16: mod_base = gm
  modified_base 17: mod_base = um
  modified_base 18: mod_base = gm
  modified_base 19: mod_base = um
  modified_base 20: mod_base = cm
  modified_base 21: mod_base = um
  misc_feature 1^2: note = phosphorothioate linkage
  misc_feature 2^3: note = phosphorothioate linkage
ttcagtattttggaggtgtct

SEQ ID NO: 578 - RNA, 21 nt, synthetic construct
  source 1..21: mol_type = other RNA
  misc_feature 1..21: note = Description: B4GALT1 siRNA sense strands (modified); Sense strand ID: ETXS1173; Underlying Base Sequence: SEQ ID NO: 358
  modified_base 1: mod_base = gm
  modified_base 2: mod_base = OTHER; note = 2'O-methyl-adenosine
  modified_base 3: mod_base = gm
  modified_base 4: mod_base = gm
  modified_base 5: mod_base = um
  modified_base 6: mod_base = gm
  modified_base 7: mod_base = OTHER; note = 2' Fluoro-guanosine
  modified_base 8: mod_base = cm
  modified_base 9: mod_base = OTHER; note = 2' Fluoro-guanosine
  modified_base 10: mod_base = OTHER; note = 2' Fluoro-cytidine
  modified_base 11: mod_base = OTHER; note = 2' Fluoro-guanosine
  modified_base 12: mod_base = gm
  modified_base 13: mod_base = cm
  modified_base 14: mod_base = um
  modified_base 15: mod_base = cm
  modified_base 16: mod_base = um
  modified_base 17: mod_base = OTHER; note = 2'O-methyl-adenosine
  modified_base 18: mod_base = OTHER; note = 2'O-methyl-adenosine
  modified_base 19: mod_base = gm
  modified_base 20: mod_base = um
  modified_base 21: mod_base = OTHER; note = 2'O-methyl-adenosine
  misc_feature 1^2: note = phosphorothioate linkage
  misc_feature 2^3: note = phosphorothioate linkage
gaggtgtctctgctctaagta

SEQ ID NO: 579 - RNA, 21 nt, synthetic construct
  source 1..21: mol_type = other RNA
  misc_feature 1..21: note = Description: B4GALT1 siRNA sense strands (modified); Sense strand ID: ETXS1175; Underlying Base Sequence: SEQ ID NO: 339
  modified_base 1: mod_base = um
  modified_base 2: mod_base = gm
  modified_base 3: mod_base = gm
  modified_base 4: mod_base = um
  modified_base 5: mod_base = um
  modified_base 6: mod_base = um
  modified_base 7: mod_base = OTHER; note = 2' Fluoro-guanosine
  modified_base 8: mod_base = OTHER; note = 2'O-methyl-adenosine
  modified_base 9: mod_base = OTHER; note = 2'Fluoro-adenosine
  modified_base 10: mod_base = OTHER; note = 2' Fluoro-cytidine
  modified_base 11: mod_base = OTHER; note = 2' Fluoro-guanosine
  modified_base 12: mod_base = cm
  modified_base 13: mod_base = OTHER; note = 2'O-methyl-adenosine
  modified_base 14: mod_base = cm
  modified_base 15: mod_base = um
  modified_base 16: mod_base = cm
  modified_base 17: mod_base = OTHER; note = 2'O-methyl-adenosine
  modified_base 18: mod_base = cm
  modified_base 19: mod_base = cm
  modified_base 20: mod_base = um
  modified_base 21: mod_base = OTHER; note = 2'O-methyl-adenosine
  misc_feature 1^2: note = phosphorothioate linkage
  misc_feature 2^3: note = phosphorothioate linkage
tggtttgaactcactcaccta

SEQ ID NO: 580 - RNA, 21 nt, synthetic construct
  source 1..21: mol_type = other RNA
  misc_feature 1..21: note = Description: B4GALT1 siRNA sense strands (modified); Sense strand ID: ETXS1177; Underlying Base Sequence: SEQ ID NO: 309
  modified_base 1: mod_base = um
  modified_base 2: mod_base = cm
  modified_base 3: mod_base = um
  modified_base 4: mod_base = gm
  modified_base 5: mod_base = OTHER; note = 2'O-methyl-adenosine
  modified_base 6: mod_base = um
  modified_base 7: mod_base = OTHER; note = 2' Fluoro-guanosine
  modified_base 8: mod_base = um
  modified_base 9: mod_base = OTHER; note = 2' Fluoro-cytidine
  modified_base 10: mod_base = OTHER; note = 2' Fluoro-guanosine
  modified_base 11: mod_base = OTHER; note = 2' Fluoro-guanosine
  modified_base 12: mod_base = OTHER; note = 2'O-methyl-adenosine
  modified_base 13: mod_base = OTHER; note = 2'O-methyl-adenosine
  modified_base 14: mod_base = um
  modified_base 15: mod_base = gm
  modified_base 16: mod_base = um
  modified_base 17: mod_base = OTHER; note = 2'O-methyl-adenosine
  modified_base 18: mod_base = OTHER; note = 2'O-methyl-adenosine
  modified_base 19: mod_base = OTHER; note = 2'O-methyl-adenosine
  modified_base 20: mod_base = gm
  modified_base 21: mod_base = um
  misc_feature 1^2: note = phosphorothioate linkage
  misc_feature 2^3: note = phosphorothioate linkage
tctgatttctgaatgtaaagt

SEQ ID NO: 581 - RNA, 21 nt, synthetic construct
  source 1..21: mol_type = other RNA
  misc_feature 1..21: note = Description: B4GALT1 siRNA sense strands (modified); Sense strand ID: ETXS1179; Underlying Base Sequence: SEQ ID NO: 304
  modified_base 1: mod_base = um
  modified_base 2: mod_base = gm
  modified_base 3: mod_base = um
  modified_base 4: mod_base = OTHER; note = 2'O-methyl-adenosine
  modified_base 5: mod_base = OTHER; note = 2'O-methyl-adenosine
  modified_base 6: mod_base = OTHER; note = 2'O-methyl-adenosine
  modified_base 7: mod_base = OTHER; note = 2' Fluoro-cytidine
  modified_base 8: mod_base = um
  modified_base 9: mod_base = OTHER; note = 2' Fluoro-guanosine
  modified_base 10: mod_base = OTHER; note = 2' Fluoro-guanosine
  modified_base 11: mod_base = OTHER; note = 2'Fluoro-adenosine
  modified_base 12: mod_base = OTHER; note = 2'O-methyl-adenosine
  modified_base 13: mod_base = um
  modified_base 14: mod_base = um
  modified_base 15: mod_base = um
  modified_base 16: mod_base = cm
  modified_base 17: mod_base = cm
  modified_base 18: mod_base = um
  modified_base 19: mod_base = OTHER; note = 2'O-methyl-adenosine
  modified_base 20: mod_base = um
  modified_base 21: mod_base = gm
  misc_feature 1^2: note = phosphorothioate linkage
  misc_feature 2^3: note = phosphorothioate linkage
tgtaaacttgaatttcctatg

SEQ ID NO: 582 - RNA, 21 nt, synthetic construct
  source 1..21: mol_type = other RNA
  misc_feature 1..21: note = Description: B4GALT1 siRNA sense strands (modified); Sense strand ID: ETXS1181; Underlying Base Sequence: SEQ ID NO: 330
  modified_base 1: mod_base = gm
  modified_base 2: mod_base = um
  modified_base 3: mod_base = gm
  modified_base 4: mod_base = um
  modified_base 5: mod_base = cm
  modified_base 6: mod_base = um
  modified_base 7: mod_base = OTHER; note = 2' Fluoro-cytidine
  modified_base 8: mod_base = um
  modified_base 9: mod_base = OTHER; note = 2' Fluoro-guanosine
  modified_base 10: mod_base = OTHER; note = 2' Fluoro-cytidine
  modified_base 11: mod_base = OTHER; note = 2' Fluoro-guanosine
  modified_base 12: mod_base = cm
  modified_base 13: mod_base = um
  modified_base 14: mod_base = OTHER; note = 2'O-methyl-adenosine
  modified_base 15: mod_base = OTHER; note = 2'O-methyl-adenosine
  modified_base 16: mod_base = gm
  modified_base 17: mod_base = um
  modified_base 18: mod_base = OTHER; note = 2'O-methyl-adenosine
  modified_base 19: mod_base = OTHER; note = 2'O-methyl-adenosine
  modified_base 20: mod_base = OTHER; note = 2'O-methyl-adenosine
  modified_base 21: mod_base = cm
  misc_feature 1^2: note = phosphorothioate linkage
  misc_feature 2^3: note = phosphorothioate linkage
gtgtctctgctctaagtaaac

SEQ ID NO: 583 - RNA, 21 nt, synthetic construct
  source 1..21: mol_type = other RNA
  misc_feature 1..21: note = Description: B4GALT1 siRNA sense strands (modified); Sense strand ID: ETXS1183; Underlying Base Sequence: SEQ ID NO: 382
  modified_base 1: mod_base = cm
  modified_base 2: mod_base = um
  modified_base 3: mod_base = gm
  modified_base 4: mod_base = cm
  modified_base 5: mod_base = gm
  modified_base 6: mod_base = um
  modified_base 7: mod_base = OTHER; note = 2' Fluoro-cytidine
  modified_base 8: mod_base = um
  modified_base 9: mod_base = OTHER; note = 2' Fluoro-cytidine
  modified_base 10: mod_base = OTHER; note = 2' Fluoro-guanosine
  modified_base 11: mod_base = OTHER; note = 2' Fluoro-cytidine
  modified_base 12: mod_base = cm
  modified_base 13: mod_base = um
  modified_base 14: mod_base = cm
  modified_base 15: mod_base = OTHER; note = 2'O-methyl-adenosine
  modified_base 16: mod_base = cm
  modified_base 17: mod_base = OTHER; note = 2'O-methyl-adenosine
  modified_base 18: mod_base = OTHER; note = 2'O-methyl-adenosine
  modified_base 19: mod_base = gm
  modified_base 20: mod_base = gm
  modified_base 21: mod_base = um
  misc_feature 1^2: note = phosphorothioate linkage
  misc_feature 2^3: note = phosphorothioate linkage
ctgcgtctctcctcacaaggt

SEQ ID NO: 584 - RNA, 21 nt, synthetic construct
  source 1..21: mol_type = other RNA
  misc_feature 1..21: note = Description: B4GALT1 siRNA sense strands (modified); Sense strand ID: ETXS1185; Underlying Base Sequence: SEQ ID NO: 387
  modified_base 1: mod_base = um
  modified_base 2: mod_base = um
  modified_base 3: mod_base = OTHER; note = 2'O-methyl-adenosine
  modified_base 4: mod_base = um
  modified_base 5: mod_base = gm
  modified_base 6: mod_base = um
  modified_base 7: mod_base = OTHER; note = 2' Fluoro-guanosine
  modified_base 8: mod_base = cm
  modified_base 9: mod_base = OTHER; note = 2'Fluoro-adenosine
  modified_base 10: mod_base = OTHER; note = 2' Fluoro-guanosine
  modified_base 11: mod_base = OTHER; note = 2' Fluoro-guanosine
  modified_base 12: mod_base = OTHER; note = 2'O-methyl-adenosine
  modified_base 13: mod_base = um
  modified_base 14: mod_base = um
  modified_base 15: mod_base = um
  modified_base 16: mod_base = um
  modified_base 17: mod_base = gm
  modified_base 18: mod_base = gm
  modified_base 19: mod_base = OTHER; note = 2'O-methyl-adenosine
  modified_base 20: mod_base = gm
  modified_base 21: mod_base = gm
  misc_feature 1^2: note = phosphorothioate linkage
  misc_feature 2^3: note = phosphorothioate linkage
ttatgttcagtattttggagg

SEQ ID NO: 585 - RNA, 21 nt, synthetic construct
  source 1..21: mol_type = other RNA
  misc_feature 1..21: note = Description: B4GALT1 siRNA sense strands (modified); Sense strand ID: ETXS1187; Underlying Base Sequence: SEQ ID NO: 352
  modified_base 1: mod_base = cm
  modified_base 2: mod_base = OTHER; note = 2'O-methyl-adenosine
  modified_base 3: mod_base = cm
  modified_base 4: mod_base = OTHER; note = 2'O-methyl-adenosine
  modified_base 5: mod_base = gm
  modified_base 6: mod_base = um
  modified_base 7: mod_base = OTHER; note = 2' Fluoro-guanosine
  modified_base 8: mod_base = gm
  modified_base 9: mod_base = OTHER; note = 2'Fluoro-adenosine
  modified_base 10: mod_base = OTHER; note = 2' Fluoro-cytidine
  modified_base 11: mod_base = OTHER; note = 2'Fluoro-adenosine
  modified_base 12: mod_base = um
  modified_base 13: mod_base = cm
  modified_base 14: mod_base = gm
  modified_base 15: mod_base = gm
  modified_base 16: mod_base = gm
  modified_base 17: mod_base = OTHER; note = 2'O-methyl-adenosine
  modified_base 18: mod_base = cm
  modified_base 19: mod_base = OTHER; note = 2'O-methyl-adenosine
  modified_base 20: mod_base = cm
  modified_base 21: mod_base = cm
  misc_feature 1^2: note = phosphorothioate linkage
  misc_feature 2^3: note = phosphorothioate linkage
cacagtggacatcgggacacc

SEQ ID NO: 586 - RNA, 21 nt, synthetic construct
  source 1..21: mol_type = other RNA
  misc_feature 1..21: note = Description: B4GALT1 siRNA sense strands (modified); Sense strand ID: ETXS1189; Underlying Base Sequence: SEQ ID NO: 361
  modified_base 1: mod_base = um
  modified_base 2: mod_base = cm
  modified_base 3: mod_base = um
  modified_base 4: mod_base = gm
  modified_base 5: mod_base = cm
  modified_base 6: mod_base = um
  modified_base 7: mod_base = OTHER; note = 2' Fluoro-cytidine
  modified_base 8: mod_base = um
  modified_base 9: mod_base = OTHER; note = 2'Fluoro-adenosine
  modified_base 10: mod_base = OTHER; note = 2'Fluoro-adenosine
  modified_base 11: mod_base = OTHER; note = 2' Fluoro-guanosine
  modified_base 12: mod_base = um
  modified_base 13: mod_base = OTHER; note = 2'O-methyl-adenosine
  modified_base 14: mod_base = OTHER; note = 2'O-methyl-adenosine
  modified_base 15: mod_base = OTHER; note = 2'O-methyl-adenosine
  modified_base 16: mod_base = cm
  modified_base 17: mod_base = OTHER; note = 2'O-methyl-adenosine
  modified_base 18: mod_base = OTHER; note = 2'O-methyl-adenosine
  modified_base 19: mod_base = cm
  modified_base 20: mod_base = OTHER; note = 2'O-methyl-adenosine
  modified_base 21: mod_base = gm
  misc_feature 1^2: note = phosphorothioate linkage
  misc_feature 2^3: note = phosphorothioate linkage
tctgctctaagtaaacaacag

SEQ ID NO: 587 - RNA, 21 nt, synthetic construct
  source 1..21: mol_type = other RNA
  misc_feature 1..21: note = Description: B4GALT1 siRNA sense strands (modified); Sense strand ID: ETXS1191; Underlying Base Sequence: SEQ ID NO: 350
  modified_base 1: mod_base = cm
  modified_base 2: mod_base = gm
  modified_base 3: mod_base = gm
  modified_base 4: mod_base = cm
  modified_base 5: mod_base = OTHER; note = 2'O-methyl-adenosine
  modified_base 6: mod_base = cm
  modified_base 7: mod_base = OTHER; note = 2'Fluoro-adenosine
  modified_base 8: mod_base = um
  modified_base 9: mod_base = OTHER; note = 2' Fluoro-guanosine
  modified_base 10: mod_base = OTHER; note = 2' Fluoro-guanosine
  modified_base 11: mod_base = OTHER; note = 2' Fluoro-cytidine
  modified_base 12: mod_base = cm
  modified_base 13: mod_base = gm
  modified_base 14: mod_base = um
  modified_base 15: mod_base = um
  modified_base 16: mod_base = gm
  modified_base 17: mod_base = cm
  modified_base 18: mod_base = OTHER; note = 2'O-methyl-adenosine
  modified_base 19: mod_base = OTHER; note = 2'O-methyl-adenosine
  modified_base 20: mod_base = um
  modified_base 21: mod_base = gm
  misc_feature 1^2: note = phosphorothioate linkage
  misc_feature 2^3: note = phosphorothioate linkage
cggcacatttccgttgcaatg

SEQ ID NO: 588 - RNA, 21 nt, synthetic construct
  source 1..21: mol_type = other RNA
  misc_feature 1..21: note = Description: B4GALT1 siRNA sense strands (modified); Sense strand ID: ETXS1193; Underlying Base Sequence: SEQ ID NO: 374
  modified_base 1: mod_base = um
  modified_base 2: mod_base = cm
  modified_base 3: mod_base = OTHER; note = 2'O-methyl-adenosine
  modified_base 4: mod_base = gm
  modified_base 5: mod_base = um
  modified_base 6: mod_base = OTHER; note = 2'O-methyl-adenosine
  modified_base 7: mod_base = OTHER; note = 2' Fluoro-guanosine
  modified_base 8: mod_base = um
  modified_base 9: mod_base = OTHER; note = 2' Fluoro-guanosine
  modified_base 10: mod_base = OTHER; note = 2' Fluoro-guanosine
  modified_base 11: mod_base = OTHER; note = 2' Fluoro-guanosine
  modified_base 12: mod_base = gm
  modified_base 13: mod_base = OTHER; note = 2'O-methyl-adenosine
  modified_base 14: mod_base = gm
  modified_base 15: mod_base = gm
  modified_base 16: mod_base = um
  modified_base 17: mod_base = gm
  modified_base 18: mod_base = um
  modified_base 19: mod_base = cm
  modified_base 20: mod_base = um
  modified_base 21: mod_base = cm
  misc_feature 1^2: note = phosphorothioate linkage
  misc_feature 2^3: note = phosphorothioate linkage
tcagtattttggaggtgtctc

SEQ ID NO: 589 - RNA, 21 nt, synthetic construct
  source 1..21: mol_type = other RNA
  misc_feature 1..21: note = Description: B4GALT1 siRNA sense strands (modified); Sense strand ID: ETXS1195; Underlying Base Sequence: SEQ ID NO: 348
  modified_base 1: mod_base = gm
  modified_base 2: mod_base = cm
  modified_base 3: mod_base = OTHER; note = 2'O-methyl-adenosine
  modified_base 4: mod_base = cm
  modified_base 5: mod_base = OTHER; note = 2'O-methyl-adenosine
  modified_base 6: mod_base = um
  modified_base 7: mod_base = OTHER; note = 2' Fluoro-guanosine
  modified_base 8: mod_base = um
  modified_base 9: mod_base = OTHER; note = 2' Fluoro-cytidine
  modified_base 10: mod_base = OTHER; note = 2' Fluoro-cytidine
  modified_base 11: mod_base = OTHER; note = 2' Fluoro-guanosine
  modified_base 12: mod_base = um
  modified_base 13: mod_base = um
  modified_base 14: mod_base = gm
  modified_base 15: mod_base = cm
  modified_base 16: mod_base = OTHER; note = 2'O-methyl-adenosine
  modified_base 17: mod_base = OTHER; note = 2'O-methyl-adenosine
  modified_base 18: mod_base = um
  modified_base 19: mod_base = gm
  modified_base 20: mod_base = gm
  modified_base 21: mod_base = OTHER; note = 2'O-methyl-adenosine
  misc_feature 1^2: note = phosphorothioate linkage
  misc_feature 2^3: note = phosphorothioate linkage
gcacatttccgttgcaatgga

SEQ ID NO: 590 - RNA, 21 nt, synthetic construct
  source 1..21: mol_type = other RNA
  misc_feature 1..21: note = Description: B4GALT1 siRNA sense strands (modified); Sense strand ID: ETXS1197; Underlying Base Sequence: SEQ ID NO: 313
  modified_base 1: mod_base = cm
  modified_base 2: mod_base = OTHER; note = 2'O-methyl-adenosine
  modified_base 3: mod_base = um
  modified_base 4: mod_base = gm
  modified_base 5: mod_base = cm
  modified_base 6: mod_base = um
  modified_base 7: mod_base = OTHER; note = 2'Fluoro-adenosine
  modified_base 8: mod_base = um
  modified_base 9: mod_base = OTHER; note = 2' Fluoro-guanosine
  modified_base 10: mod_base = OTHER; note = 2' Fluoro-guanosine
  modified_base 11: mod_base = OTHER; note = 2'Fluoro-adenosine
  modified_base 12: mod_base = OTHER; note = 2'O-methyl-adenosine
  modified_base 13: mod_base = OTHER; note = 2'O-methyl-adenosine
  modified_base 14: mod_base = cm
  modified_base 15: mod_base = um
  modified_base 16: mod_base = um
  modified_base 17: mod_base = gm
  modified_base 18: mod_base = OTHER; note = 2'O-methyl-adenosine
  modified_base 19: mod_base = OTHER; note = 2'O-methyl-adenosine
  modified_base 20: mod_base = um
  modified_base 21: mod_base = um
  misc_feature 1^2: note = phosphorothioate linkage
  misc_feature 2^3: note = phosphorothioate linkage
catgctatgtaaacttgaatt

SEQ ID NO: 591 - RNA, 21 nt, synthetic construct
  source 1..21: mol_type = other RNA
  misc_feature 1..21: note = Description: B4GALT1 siRNA sense strands (modified); Sense strand ID: ETXS1199; Underlying Base Sequence: SEQ ID NO: 338
  modified_base 1: mod_base = OTHER; note = 2'O-methyl-adenosine
  modified_base 2: mod_base = um
  modified_base 3: mod_base = cm
  modified_base 4: mod_base = cm
  modified_base 5: mod_base = um
  modified_base 6: mod_base = cm
  modified_base 7: mod_base = OTHER; note = 2'Fluoro-adenosine
  modified_base 8: mod_base = gm
  modified_base 9: mod_base = OTHER; note = 2'Fluoro-adenosine
  modified_base 10: mod_base = OTHER; note = 2' Fluoro-guanosine
  modified_base 11: mod_base = OTHER; note = 2' Fluoro-guanosine
  modified_base 12: mod_base = um
  modified_base 13: mod_base = um
  modified_base 14: mod_base = um
  modified_base 15: mod_base = gm
  modified_base 16: mod_base = OTHER; note = 2'O-methyl-adenosine
  modified_base 17: mod_base = cm
  modified_base 18: mod_base = cm
  modified_base 19: mod_base = gm
  modified_base 20: mod_base = OTHER; note = 2'O-methyl-adenosine
  modified_base 21: mod_base = OTHER; note = 2'O-methyl-adenosine
  misc_feature 1^2: note = phosphorothioate linkage
  misc_feature 2^3: note = phosphorothioate linkage
atcctcagaggtttgaccgaa

SEQ ID NO: 592 - RNA, 21 nt, synthetic construct
  source 1..21: mol_type = other RNA
  misc_feature 1..21: note = Description: B4GALT1 siRNA sense strands (modified); Sense strand ID: ETXS1201; Underlying Base Sequence: SEQ ID NO: 400
  modified_base 1: mod_base = um
  modified_base 2: mod_base = cm
  modified_base 3: mod_base = OTHER; note = 2'O-methyl-adenosine
  modified_base 4: mod_base = cm
  modified_base 5: mod_base = OTHER; note = 2'O-methyl-adenosine
  modified_base 6: mod_base = gm
  modified_base 7: mod_base = OTHER; note = 2' Fluoro-guanosine
  modified_base 8: mod_base = gm
  modified_base 9: mod_base = OTHER; note = 2' Fluoro-guanosine
  modified_base 10: mod_base = OTHER; note = 2'Fluoro-adenosine
  modified_base 11: mod_base = OTHER; note = 2' Fluoro-cytidine
  modified_base 12: mod_base = OTHER; note = 2'O-methyl-adenosine
  modified_base 13: mod_base = um
  modified_base 14: mod_base = cm
  modified_base 15: mod_base = gm
  modified_base 16: mod_base = gm
  modified_base 17: mod_base = gm
  modified_base 18: mod_base = OTHER; note = 2'O-methyl-adenosine
  modified_base 19: mod_base = cm
  modified_base 20: mod_base = OTHER; note = 2'O-methyl-adenosine
  modified_base 21: mod_base = cm
  misc_feature 1^2: note = phosphorothioate linkage
  misc_feature 2^3: note = phosphorothioate linkage
tcacagtggacatcgggacac

SEQ ID NO: 593 - RNA, 21 nt, synthetic construct
  source 1..21: mol_type = other RNA
  misc_feature 1..21: note = Description: B4GALT1 siRNA sense strands (modified); Sense strand ID: ETXS1203; Underlying Base Sequence: SEQ ID NO: 375
  modified_base 1: mod_base = cm
  modified_base 2: mod_base = um
  modified_base 3: mod_base = um
  modified_base 4: mod_base = um
  modified_base 5: mod_base = cm
  modified_base 6: mod_base = OTHER; note = 2'O-methyl-adenosine
  modified_base 7: mod_base = OTHER; note = 2'Fluoro-adenosine
  modified_base 8: mod_base = gm
  modified_base 9: mod_base = OTHER; note = 2'Fluoro-adenosine
  modified_base 10: mod_base = OTHER; note = 2'Fluoro-adenosine
  modified_base 11: mod_base = OTHER; note = 2' Fluoro-guanosine
  modified_base 12: mod_base = cm
  modified_base 13: mod_base = cm
  modified_base 14: mod_base = um
  modified_base 15: mod_base = um
  modified_base 16: mod_base = gm
  modified_base 17: mod_base = OTHER; note = 2'O-methyl-adenosine
  modified_base 18: mod_base = OTHER; note = 2'O-methyl-adenosine
  modified_base 19: mod_base = gm
  modified_base 20: mod_base = gm
  modified_base 21: mod_base = OTHER; note = 2'O-methyl-adenosine
  misc_feature 1^2: note = phosphorothioate linkage
  misc_feature 2^3: note = phosphorothioate linkage
ctttcaagaagccttgaagga

SEQ ID NO: 594 - RNA, 21 nt, synthetic construct
  source 1..21: mol_type = other RNA
  misc_feature 1..21: note = Description: B4GALT1 siRNA sense strands (modified); Sense strand ID: ETXS1205; Underlying Base Sequence: SEQ ID NO: 325
  modified_base 1: mod_base = OTHER; note = 2'O-methyl-adenosine
  modified_base 2: mod_base = gm
  modified_base 3: mod_base = gm
  modified_base 4: mod_base = um
  modified_base 5: mod_base = gm
  modified_base 6: mod_base = um
  modified_base 7: mod_base = OTHER; note = 2' Fluoro-cytidine
  modified_base 8: mod_base = um
  modified_base 9: mod_base = OTHER; note = 2' Fluoro-cytidine
  modified_base 10: mod_base = OTHER; note = 2' Fluoro-guanosine
  modified_base 11: mod_base = OTHER; note = 2' Fluoro-guanosine
  modified_base 12: mod_base = cm
  modified_base 13: mod_base = um
  modified_base 14: mod_base = cm
  modified_base 15: mod_base = um
  modified_base 16: mod_base = OTHER; note = 2'O-methyl-adenosine
  modified_base 17: mod_base = OTHER; note = 2'O-methyl-adenosine
  modified_base 18: mod_base = gm
  modified_base 19: mod_base = um
  modified_base 20: mod_base = OTHER; note = 2'O-methyl-adenosine
  modified_base 21: mod_base = OTHER; note = 2'O-methyl-adenosine
  misc_feature 1^2: note = phosphorothioate linkage
  misc_feature 2^3: note = phosphorothioate linkage
aggtgtctctgctctaagtaa

SEQ ID NO: 595 - RNA, 21 nt, synthetic construct
  source 1..21: mol_type = other RNA
  misc_feature 1..21: note = Description: B4GALT1 siRNA sense strands (modified); Sense strand ID: ETXS1207; Underlying Base Sequence: SEQ ID NO: 363
  modified_base 1: mod_base = um
  modified_base 2: mod_base = um
  modified_base 3: mod_base = um
  modified_base 4: mod_base = um
  modified_base 5: mod_base = gm
  modified_base 6: mod_base = gm
  modified_base 7: mod_base = OTHER; note = 2'Fluoro-adenosine
  modified_base 8: mod_base = gm
  modified_base 9: mod_base = OTHER; note = 2' Fluoro-guanosine
  modified_base 10: mod_base = OTHER; note = 2' Fluoro-guanosine
  modified_base 11: mod_base = OTHER; note = 2' Fluoro-guanosine
  modified_base 12: mod_base = um
  modified_base 13: mod_base = cm
  modified_base 14: mod_base = um
  modified_base 15: mod_base = cm
  modified_base 16: mod_base = um
  modified_base 17: mod_base = gm
  modified_base 18: mod_base = cm
  modified_base 19: mod_base = um
  modified_base 20: mod_base = cm
  modified_base 21: mod_base = um
  misc_feature 1^2: note = phosphorothioate linkage
  misc_feature 2^3: note = phosphorothioate linkage
ttttggaggtgtctctgctct

SEQ ID NO: 596 - RNA, 21 nt, synthetic construct
  source 1..21: mol_type = other RNA
  misc_feature 1..21: note = Description: B4GALT1 siRNA sense strands (modified); Sense strand ID: ETXS1209; Underlying Base Sequence: SEQ ID NO: 355
  modified_base 1: mod_base = gm
  modified_base 2: mod_base = cm
  modified_base 3: mod_base = OTHER; note = 2'O-methyl-adenosine
  modified_base 4: mod_base = um
  modified_base 5: mod_base = gm
  modified_base 6: mod_base = OTHER; note = 2'O-methyl-adenosine
  modified_base 7: mod_base = OTHER; note = 2'Fluoro-adenosine
  modified_base 8: mod_base = um
  modified_base 9: mod_base = OTHER; note = 2' Fluoro-guanosine
  modified_base 10: mod_base = OTHER; note = 2' Fluoro-guanosine
  modified_base 11: mod_base = OTHER; note = 2' Fluoro-guanosine
  modified_base 12: mod_base = cm
  modified_base 13: mod_base = cm
  modified_base 14: mod_base = um
  modified_base 15: mod_base = um
  modified_base 16: mod_base = um
  modified_base 17: mod_base = um
  modified_base 18: mod_base = OTHER; note = 2'O-methyl-adenosine
  modified_base 19: mod_base = OTHER; note = 2'O-methyl-adenosine
  modified_base 20: mod_base = um
  modified_base 21: mod_base = um
  misc_feature 1^2: note = phosphorothioate linkage
  misc_feature 2^3: note = phosphorothioate linkage
gcatgaatgtgccttttaatt

SEQ ID NO: 597 - RNA, 21 nt, synthetic construct
  source 1..21: mol_type = other RNA
  misc_feature 1..21: note = Description: B4GALT1 siRNA sense strands (modified); Sense strand ID: ETXS1211; Underlying Base Sequence: SEQ ID NO: 377
  modified_base 1: mod_base = OTHER; note = 2'O-methyl-adenosine
  modified_base 2: mod_base = cm
  modified_base 3: mod_base = OTHER; note = 2'O-methyl-adenosine
  modified_base 4: mod_base = um
  modified_base 5: mod_base = cm
  modified_base 6: mod_base = gm
  modified_base 7: mod_base = OTHER; note = 2' Fluoro-guanosine
  modified_base 8: mod_base = gm
  modified_base 9: mod_base = OTHER; note = 2'Fluoro-adenosine
  modified_base 10: mod_base = OTHER; note = 2' Fluoro-cytidine
  modified_base 11: mod_base = OTHER; note = 2'Fluoro-adenosine
  modified_base 12: mod_base = cm
  modified_base 13: mod_base = cm
  modified_base 14: mod_base = gm
  modified_base 15: mod_base = OTHER; note = 2'O-methyl-adenosine
  modified_base 16: mod_base = gm
  modified_base 17: mod_base = cm
  modified_base 18: mod_base = um
  modified_base 19: mod_base = OTHER; note = 2'O-methyl-adenosine
  modified_base 20: mod_base = gm
  modified_base 21: mod_base = cm
  misc_feature 1^2: note = phosphorothioate linkage
  misc_feature 2^3: note = phosphorothioate linkage
acatcgggacaccgagctagc

SEQ ID NO: 598 - RNA, 21 nt, synthetic construct
  source 1..21: mol_type = other RNA
  misc_feature 1..21: note = Description: B4GALT1 siRNA sense strands (modified); Sense strand ID: ETXS1213; Underlying Base Sequence: SEQ ID NO: 398
  modified_base 1: mod_base = OTHER; note = 2'O-methyl-adenosine
  modified_base 2: mod_base = cm
  modified_base 3: mod_base = um
  modified_base 4: mod_base = gm
  modified_base 5: mod_base = cm
  modified_base 6: mod_base = gm
  modified_base 7: mod_base = OTHER; note = 2' Fluoro-guanosine
  modified_base 8: mod_base = cm
  modified_base 9: mod_base = OTHER; note = 2' Fluoro-guanosine
  modified_base 10: mod_base = OTHER; note = 2' Fluoro-cytidine
  modified_base 11: mod_base = OTHER; note = 2' Fluoro-guanosine
  modified_base 12: mod_base = cm
  modified_base 13: mod_base = cm
  modified_base 14: mod_base = um
  modified_base 15: mod_base = cm
  modified_base 16: mod_base = OTHER; note = 2'O-methyl-adenosine
  modified_base 17: mod_base = cm
  modified_base 18: mod_base = OTHER; note = 2'O-methyl-adenosine
  modified_base 19: mod_base = OTHER; note = 2'O-methyl-adenosine
  modified_base 20: mod_base = gm
  modified_base 21: mod_base = gm
  misc_feature 1^2: note = phosphorothioate linkage
  misc_feature 2^3: note = phosphorothioate linkage
actgcgtctctcctcacaagg

SEQ ID NO: 599 - RNA, 21 nt, synthetic construct
  source 1..21: mol_type = other RNA
  misc_feature 1..21: note = Description: B4GALT1 siRNA sense strands (modified); Sense strand ID: ETXS1215; Underlying Base Sequence: SEQ ID NO: 391
  modified_base 1: mod_base = gm
  modified_base 2: mod_base = um
  modified_base 3: mod_base = OTHER; note = 2'O-methyl-adenosine
  modified_base 4: mod_base = um
  modified_base 5: mod_base = OTHER; note = 2'O-methyl-adenosine
  modified_base 6: mod_base = cm
  modified_base 7: mod_base = OTHER; note = 2' Fluoro-cytidine
  modified_base 8: mod_base = cm
  modified_base 9: mod_base = OTHER; note = 2'Fluoro-adenosine
  modified_base 10: mod_base = OTHER; note = 2'Fluoro-adenosine
  modified_base 11: mod_base = OTHER; note = 2'Fluoro-adenosine
  modified_base 12: mod_base = um
  modified_base 13: mod_base = cm
  modified_base 14: mod_base = OTHER; note = 2'O-methyl-adenosine
  modified_base 15: mod_base = cm
  modified_base 16: mod_base = OTHER; note = 2'O-methyl-adenosine
  modified_base 17: mod_base = gm
  modified_base 18: mod_base = um
  modified_base 19: mod_base = gm
  modified_base 20: mod_base = gm
  modified_base 21: mod_base = OTHER; note = 2'O-methyl-adenosine
  misc_feature 1^2: note = phosphorothioate linkage
  misc_feature 2^3: note = phosphorothioate linkage
gtatacccaaatcacagtgga

SEQ ID NO: 600 - RNA, 21 nt, synthetic construct
  source 1..21: mol_type = other RNA
  misc_feature 1..21: note = Description: B4GALT1 siRNA sense strands (modified); Sense strand ID: ETXS1217; Underlying Base Sequence: SEQ ID NO: 368
  modified_base 1: mod_base = um
  modified_base 2: mod_base = gm
  modified_base 3: mod_base = cm
  modified_base 4: mod_base = um
  modified_base 5: mod_base = gm
  modified_base 6: mod_base = gm
  modified_base 7: mod_base = OTHER; note = 2'Fluoro-adenosine
  modified_base 8: mod_base = um
  modified_base 9: mod_base = OTHER; note = 2' Fluoro-guanosine
  modified_base 10: mod_base = OTHER; note = 2' Fluoro-guanosine
  modified_base 11: mod_base = OTHER; note = 2'Fluoro-adenosine
  modified_base 12: mod_base = cm
  modified_base 13: mod_base = OTHER; note = 2'O-methyl-adenosine
  modified_base 14: mod_base = gm
  modified_base 15: mod_base = OTHER; note = 2'O-methyl-adenosine
  modified_base 16: mod_base = gm
  modified_base 17: mod_base = OTHER; note = 2'O-methyl-adenosine
  modified_base 18: mod_base = um
  modified_base 19: mod_base = OTHER; note = 2'O-methyl-adenosine
  modified_base 20: mod_base = cm
  modified_base 21: mod_base = cm
  misc_feature 1^2: note = phosphorothioate linkage
  misc_feature 2^3: note = phosphorothioate linkage
tgctggatgtacagagatacc

SEQ ID NO: 601 - RNA, 21 nt, synthetic construct
  source 1..21: mol_type = other RNA
  misc_feature 1..21: note = Description: B4GALT1 siRNA sense strands (modified); Sense strand ID: ETXS1219; Underlying Base Sequence: SEQ ID NO: 307
  modified_base 1: mod_base = OTHER; note = 2'O-methyl-adenosine
  modified_base 2: mod_base = um
  modified_base 3: mod_base = gm
  modified_base 4: mod_base = um
  modified_base 5: mod_base = OTHER; note = 2'O-methyl-adenosine
  modified_base 6: mod_base = OTHER; note = 2'O-methyl-adenosine
  modified_base 7: mod_base = OTHER; note = 2'Fluoro-adenosine
  modified_base 8: mod_base = cm
  modified_base 9: mod_base = OTHER; note = 2' Fluoro-guanosine
  modified_base 10: mod_base = OTHER; note = 2' Fluoro-guanosine
  modified_base 11: mod_base = OTHER; note = 2' Fluoro-guanosine
  modified_base 12: mod_base = OTHER; note = 2'O-methyl-adenosine
  modified_base 13: mod_base = OTHER; note = 2'O-methyl-adenosine
  modified_base 14: mod_base = um
  modified_base 15: mod_base = um
  modified_base 16: mod_base = um
  modified_base 17: mod_base = cm
  modified_base 18: mod_base = cm
  modified_base 19: mod_base = um
  modified_base 20: mod_base = OTHER; note = 2'O-methyl-adenosine
  modified_base 21: mod_base = um
  misc_feature 1^2: note = phosphorothioate linkage
  misc_feature 2^3: note = phosphorothioate linkage
atgtaaacttgaatttcctat

SEQ ID NO: 602 - RNA, 21 nt, synthetic construct
  source 1..21: mol_type = other RNA
  misc_feature 1..21: note = Description: B4GALT1 siRNA sense strands (modified); Sense strand ID: ETXS1221; Underlying Base Sequence: SEQ ID NO: 397
  modified_base 1: mod_base = gm
  modified_base 2: mod_base = gm
  modified_base 3: mod_base = gm
  modified_base 4: mod_base = gm
  modified_base 5: mod_base = cm
  modified_base 6: mod_base = um
  modified_base 7: mod_base = OTHER; note = 2' Fluoro-guanosine
  modified_base 8: mod_base = gm
  modified_base 9: mod_base = OTHER; note = 2' Fluoro-guanosine
  modified_base 10: mod_base = OTHER; note = 2' Fluoro-guanosine
  modified_base 11: mod_base = OTHER; note = 2'Fluoro-adenosine
  modified_base 12: mod_base = gm
  modified_base 13: mod_base = gm
  modified_base 14: mod_base = OTHER; note = 2'O-methyl-adenosine
  modified_base 15: mod_base = gm
  modified_base 16: mod_base = OTHER; note = 2'O-methyl-adenosine
  modified_base 17: mod_base = OTHER; note = 2'O-methyl-adenosine
  modified_base 18: mod_base = gm
  modified_base 19: mod_base = OTHER; note = 2'O-methyl-adenosine
  modified_base 20: mod_base = um
  modified_base 21: mod_base = gm
  misc_feature 1^2: note = phosphorothioate linkage
  misc_feature 2^3: note = phosphorothioate linkage
ggggctggggaggagaagatg

SEQ ID NO: 603 - RNA, 21 nt, synthetic construct
  source 1..21: mol_type = other RNA
  misc_feature 1..21: note = Description: B4GALT1 siRNA sense strands (modified); Sense strand ID: ETXS1223; Underlying Base Sequence: SEQ ID NO: 384
  modified_base 1: mod_base = cm
  modified_base 2: mod_base = um
  modified_base 3: mod_base = cm
  modified_base 4: mod_base = um
  modified_base 5: mod_base = gm
  modified_base 6: mod_base = cm
  modified_base 7: mod_base = OTHER; note = 2' Fluoro-guanosine
  modified_base 8: mod_base = cm
  modified_base 9: mod_base = OTHER; note = 2' Fluoro-guanosine
  modified_base 10: mod_base = OTHER; note = 2'Fluoro-adenosine
  modified_base 11: mod_base = OTHER; note = 2'Fluoro-adenosine
  modified_base 12: mod_base = gm
  modified_base 13: mod_base = um
  modified_base 14: mod_base = OTHER; note = 2'O-methyl-adenosine
  modified_base 15: mod_base = OTHER; note = 2'O-methyl-adenosine
  modified_base 16: mod_base = OTHER; note = 2'O-methyl-adenosine
  modified_base 17: mod_base = cm
  modified_base 18: mod_base = OTHER; note = 2'O-methyl-adenosine
  modified_base 19: mod_base = OTHER; note = 2'O-methyl-adenosine
  modified_base 20: mod_base = cm
  modified_base 21: mod_base = OTHER; note = 2'O-methyl-adenosine
  misc_feature 1^2: note = phosphorothioate linkage
  misc_feature 2^3: note = phosphorothioate linkage
ctctgctctaagtaaacaaca

SEQ ID NO: 604 - RNA, 21 nt, synthetic construct
  source 1..21: mol_type = other RNA
  misc_feature 1..21: note = Description: B4GALT1 siRNA sense strands (modified); Sense strand ID: ETXS1225; Underlying Base Sequence: SEQ ID NO: 392
  modified_base 1: mod_base = um
  modified_base 2: mod_base = gm
  modified_base 3: mod_base = gm
  modified_base 4: mod_base = gm
  modified_base 5: mod_base = gm
  modified_base 6: mod_base = cm
  modified_base 7: mod_base = OTHER; note = 2' Fluoro-guanosine
  modified_base 8: mod_base = gm
  modified_base 9: mod_base = OTHER; note = 2' Fluoro-guanosine
  modified_base 10: mod_base = OTHER; note = 2' Fluoro-guanosine
  modified_base 11: mod_base = OTHER; note = 2' Fluoro-guanosine
  modified_base 12: mod_base = OTHER; note = 2'O-methyl-adenosine
  modified_base 13: mod_base = gm
  modified_base 14: mod_base = gm
  modified_base 15: mod_base = OTHER; note = 2'O-methyl-adenosine
  modified_base 16: mod_base = gm
  modified_base 17: mod_base = OTHER; note = 2'O-methyl-adenosine
  modified_base 18: mod_base = OTHER; note = 2'O-methyl-adenosine
  modified_base 19: mod_base = gm
  modified_base 20: mod_base = OTHER; note = 2'O-methyl-adenosine
  modified_base 21: mod_base = um
  misc_feature 1^2: note = phosphorothioate linkage
  misc_feature 2^3: note = phosphorothioate linkage
tggggctggggaggagaagat

SEQ ID NO: 605 - RNA, 21 nt, synthetic construct
  source 1..21: mol_type = other RNA
  misc_feature 1..21: note = Description: B4GALT1 siRNA sense strands (modified); Sense strand ID: ETXS1227; Underlying Base Sequence: SEQ ID NO: 383
  modified_base 1: mod_base = OTHER; note = 2'O-methyl-adenosine
  modified_base 2: mod_base = OTHER; note = 2'O-methyl-adenosine
  modified_base 3: mod_base = um
  modified_base 4: mod_base = cm
  modified_base 5: mod_base = OTHER; note = 2'O-methyl-adenosine
  modified_base 6: mod_base = cm
  modified_base 7: mod_base = OTHER; note = 2'Fluoro-adenosine
  modified_base 8: mod_base = gm
  modified_base 9: mod_base = OTHER; note = 2' Fluoro-guanosine
  modified_base 10: mod_base = OTHER; note = 2' Fluoro-guanosine
  modified_base 11: mod_base = OTHER; note = 2' Fluoro-guanosine
  modified_base 12: mod_base = OTHER; note = 2'O-methyl-adenosine
  modified_base 13: mod_base = cm
  modified_base 14: mod_base = OTHER; note = 2'O-methyl-adenosine
  modified_base 15: mod_base = um
  modified_base 16: mod_base = cm
  modified_base 17: mod_base = gm
  modified_base 18: mod_base = gm
  modified_base 19: mod_base = gm
  modified_base 20: mod_base = OTHER; note = 2'O-methyl-adenosine
  modified_base 21: mod_base = cm
  misc_feature 1^2: note = phosphorothioate linkage
  misc_feature 2^3: note = phosphorothioate linkage
aatcacagtggacatcgggac

SEQ ID NO: 606 - RNA, 21 nt, synthetic construct
  source 1..21: mol_type = other RNA
  misc_feature 1..21: note = Description: B4GALT1 siRNA sense strands (modified); Sense strand ID: ETXS1229; Underlying Base Sequence: SEQ ID NO: 395
  modified_base 1: mod_base = OTHER; note = 2'O-methyl-adenosine
  modified_base 2: mod_base = gm
  modified_base 3: mod_base = um
  modified_base 4: mod_base = gm
  modified_base 5: mod_base = gm
  modified_base 6: mod_base = OTHER; note = 2'O-methyl-adenosine
  modified_base 7: mod_base = OTHER; note = 2' Fluoro-cytidine
  modified_base 8: mod_base = OTHER; note = 2'O-methyl-adenosine
  modified_base 9: mod_base = OTHER; note = 2' Fluoro-guanosine
  modified_base 10: mod_base = OTHER; note = 2' Fluoro-cytidine
  modified_base 11: mod_base = OTHER; note = 2' Fluoro-guanosine
  modified_base 12: mod_base = gm
  modified_base 13: mod_base = gm
  modified_base 14: mod_base = OTHER; note = 2'O-methyl-adenosine
  modified_base 15: mod_base = cm
  modified_base 16: mod_base = OTHER; note = 2'O-methyl-adenosine
  modified_base 17: mod_base = cm
  modified_base 18: mod_base = cm
  modified_base 19: mod_base = gm
  modified_base 20: mod_base = OTHER; note = 2'O-methyl-adenosine
  modified_base 21: mod_base = gm
  misc_feature 1^2: note = phosphorothioate linkage
  misc_feature 2^3: note = phosphorothioate linkage
agtggacatcgggacaccgag

SEQ ID NO: 607 - RNA, 21 nt, synthetic construct
  source 1..21: mol_type = other RNA
  misc_feature 1..21: note = Description: B4GALT1 siRNA sense strands (modified); Sense strand ID: ETXS1231; Underlying Base Sequence: SEQ ID NO: 399
  modified_base 1: mod_base = OTHER; note = 2'O-methyl-adenosine
  modified_base 2: mod_base = OTHER; note = 2'O-methyl-adenosine
  modified_base 3: mod_base = um
  modified_base 4: mod_base = OTHER; note = 2'O-methyl-adenosine
  modified_base 5: mod_base = OTHER; note = 2'O-methyl-adenosine
  modified_base 6: mod_base = um
  modified_base 7: mod_base = OTHER; note = 2' Fluoro-guanosine
  modified_base 8: mod_base = OTHER; note = 2'O-methyl-adenosine
  modified_base 9: mod_base = OTHER; note = 2' Fluoro-guanosine
  modified_base 10: mod_base = OTHER; note = 2' Fluoro-guanosine
  modified_base 11: mod_base = OTHER; note = 2' Fluoro-guanosine
  modified_base 12: mod_base = gm
  modified_base 13: mod_base = gm
  modified_base 14: mod_base = gm
  modified_base 15: mod_base = cm
  modified_base 16: mod_base = um
  modified_base 17: mod_base = gm
  modified_base 18: mod_base = gm
  modified_base 19: mod_base = gm
  modified_base 20: mod_base = gm
  modified_base 21: mod_base = OTHER; note = 2'O-methyl-adenosine
  misc_feature 1^2: note = phosphorothioate linkage
  misc_feature 2^3: note = phosphorothioate linkage
aataattattggggctgggga

SEQ ID NO: 608 - RNA, 21 nt, synthetic construct
  source 1..21: mol_type = other RNA
  misc_feature 1..21: note = Description: B4GALT1 siRNA sense strands (modified); Sense strand ID: ETXS1233; Underlying Base Sequence: SEQ ID NO: 328
  modified_base 1: mod_base = cm
  modified_base 2: mod_base = OTHER; note = 2'O-methyl-adenosine
  modified_base 3: mod_base = gm
  modified_base 4: mod_base = um
  modified_base 5: mod_base = OTHER; note = 2'O-methyl-adenosine
  modified_base 6: mod_base = um
  modified_base 7: mod_base = OTHER; note = 2' Fluoro-guanosine
  modified_base 8: mod_base = um
  modified_base 9: mod_base = OTHER; note = 2' Fluoro-guanosine
  modified_base 10: mod_base = OTHER; note = 2' Fluoro-guanosine
  modified_base 11: mod_base = OTHER; note = 2' Fluoro-guanosine
  modified_base 12: mod_base = OTHER; note = 2'O-methyl-adenosine
  modified_base 13: mod_base = gm
  modified_base 14: mod_base = gm
  modified_base 15: mod_base = um
  modified_base 16: mod_base = gm
  modified_base 17: mod_base = um
  modified_base 18: mod_base = cm
  modified_base 19: mod_base = um
  modified_base 20: mod_base = cm
  modified_base 21: mod_base = um
  misc_feature 1^2: note = phosphorothioate linkage
  misc_feature 2^3: note = phosphorothioate linkage
cagtattttggaggtgtctct

SEQ ID NO: 609 - RNA, 21 nt, synthetic construct
  source 1..21: mol_type = other RNA
  misc_feature 1..21: note = Description: B4GALT1 siRNA sense strands (modified); Sense strand ID: ETXS1235; Underlying Base Sequence: SEQ ID NO: 344
  modified_base 1: mod_base = OTHER; note = 2'O-methyl-adenosine
  modified_base 2: mod_base = um
  modified_base 3: mod_base = um
  modified_base 4: mod_base = um
  modified_base 5: mod_base = um
  modified_base 6: mod_base = gm
  modified_base 7: mod_base = OTHER; note = 2' Fluoro-guanosine
  modified_base 8: mod_base = OTHER; note = 2'O-methyl-adenosine
  modified_base 9: mod_base = OTHER; note = 2' Fluoro-guanosine
  modified_base 10: mod_base = OTHER; note = 2' Fluoro-guanosine
  modified_base 11: mod_base = OTHER; note = 2' Fluoro-guanosine
  modified_base 12: mod_base = gm
  modified_base 13: mod_base = um
  modified_base 14: mod_base = cm
  modified_base 15: mod_base = um
  modified_base 16: mod_base = cm
  modified_base 17: mod_base = um
  modified_base 18: mod_base = gm
  modified_base 19: mod_base = cm
  modified_base 20: mod_base = um
  modified_base 21: mod_base = cm
  misc_feature 1^2: note = phosphorothioate linkage
  misc_feature 2^3: note = phosphorothioate linkage
attttggaggtgtctctgctc

SEQ ID NO: 610 - RNA, 21 nt, synthetic construct
  source 1..21: mol_type = other RNA
  misc_feature 1..21: note = Description: B4GALT1 siRNA sense strands (modified); Sense strand ID: ETXS2399; Underlying Base Sequence: SEQ ID NO: 302
  modified_base 1: mod_base = OTHER; note = 2'O-methyl-adenosine
  modified_base 2: mod_base = OTHER; note = 2'O-methyl-adenosine
  modified_base 3: mod_base = OTHER; note = 2'O-methyl-adenosine
  modified_base 4: mod_base = cm
  modified_base 5: mod_base = um
  modified_base 6: mod_base = um
  modified_base 7: mod_base = OTHER; note = 2' Fluoro-guanosine
  modified_base 8: mod_base = OTHER; note = 2'O-methyl-adenosine
  modified_base 9: mod_base = OTHER; note = 2'Fluoro-adenosine
  modified_base 10: mod_base = OTHER; note = 2' Fluoro-guanosine
  modified_base 11: mod_base = OTHER; note = 2' Fluoro-guanosine
  modified_base 12: mod_base = OTHER; note = 2' Fluoro-guanosine
  modified_base 13: mod_base = cm
  modified_base 14: mod_base = cm
  modified_base 15: mod_base = um
  modified_base 16: mod_base = OTHER; note = 2'O-methyl-adenosine
  modified_base 17: mod_base = um
  modified_base 18: mod_base = gm
  modified_base 19: mod_base = um
  modified_base 20: mod_base = OTHER; note = 2'O-methyl-adenosine
  modified_base 21: mod_base = um
  misc_feature 1^2: note = phosphorothioate linkage
  misc_feature 2^3: note = phosphorothioate linkage
  misc_feature 1: note = inverted abasic nucleoside
  misc_feature 2: note = inverted abasic nucleoside
aaacttgaatttcctatgtat

SEQ ID NO: 611 - RNA, 21 nt, synthetic construct
  source 1..21: mol_type = other RNA
  misc_feature 1..21: note = Description: B4GALT1 siRNA sense strands (modified); Sense strand ID: ETXS2401; Underlying Base Sequence: SEQ ID NO: 302
  modified_base 1: mod_base = OTHER; note = 2'O-methyl-adenosine
  modified_base 2: mod_base = OTHER; note = 2'O-methyl-adenosine
  modified_base 3: mod_base = OTHER; note = 2'O-methyl-adenosine
  modified_base 4: mod_base = cm
  modified_base 5: mod_base = um
  modified_base 6: mod_base = um
  modified_base 7: mod_base = gm
  modified_base 8: mod_base = OTHER; note = 2'O-methyl-adenosine
  modified_base 9: mod_base = OTHER; note = 2'Fluoro-adenosine
  modified_base 10: mod_base = OTHER; note = 2' Fluoro-guanosine
  modified_base 11: mod_base = OTHER; note = 2' Fluoro-guanosine
  modified_base 12: mod_base = um
  modified_base 13: mod_base = cm
  modified_base 14: mod_base = cm
  modified_base 15: mod_base = um
  modified_base 16: mod_base = OTHER; note = 2'O-methyl-adenosine
  modified_base 17: mod_base = um
  modified_base 18: mod_base = gm
  modified_base 19: mod_base = um
  modified_base 20: mod_base = OTHER; note = 2'O-methyl-adenosine
  modified_base 21: mod_base = um
  misc_feature 1^2: note = phosphorothioate linkage
  misc_feature 2^3: note = phosphorothioate linkage
  misc_feature 1: note = inverted abasic nucleoside
  misc_feature 2: note = inverted abasic nucleoside
aaacttgaatttcctatgtat

SEQ ID NO: 612 - RNA, 21 nt, synthetic construct
  source 1..21: mol_type = other RNA
  misc_feature 1..21: note = Description: B4GALT1 siRNA sense strands (modified); Sense strand ID: ETXS2405; Underlying Base Sequence: SEQ ID NO: 305
  modified_base 1: mod_base = cm
  modified_base 2: mod_base = um
  modified_base 3: mod_base = um
  modified_base 4: mod_base = gm
  modified_base 5: mod_base = OTHER; note = 2'O-methyl-adenosine
  modified_base 6: mod_base = OTHER; note = 2'O-methyl-adenosine
  modified_base 7: mod_base = OTHER; note = 2' Fluoro-guanosine
  modified_base 8: mod_base = um
  modified_base 9: mod_base = OTHER; note = 2' Fluoro-guanosine
  modified_base 10: mod_base = OTHER; note = 2' Fluoro-cytidine
  modified_base 11: mod_base = OTHER; note = 2' Fluoro-cytidine
  modified_base 12: mod_base = OTHER; note = 2' Fluoro-guanosine
  modified_base 13: mod_base = OTHER; note = 2'O-methyl-adenosine
  modified_base 14: mod_base = um
  modified_base 15: mod_base = gm
  modified_base 16: mod_base = um
  modified_base 17: mod_base = OTHER; note = 2'O-methyl-adenosine
  modified_base 18: mod_base = um
  modified_base 19: mod_base = um
  modified_base 20: mod_base = um
  modified_base 21: mod_base = um
  misc_feature 1^2: note = phosphorothioate linkage
  misc_feature 2^3: note = phosphorothioate linkage
  misc_feature 1: note = inverted abasic nucleoside
  misc_feature 2: note = inverted abasic nucleoside
cttgaatttcctatgtatttt

SEQ ID NO: 613 - RNA, 21 nt, synthetic construct
  source 1..21: mol_type = other RNA
  misc_feature 1..21: note = Description: B4GALT1 siRNA sense strands (modified); Sense strand ID: ETXS2407; Underlying Base Sequence: SEQ ID NO: 305
  modified_base 1: mod_base = cm
  modified_base 2: mod_base = um
  modified_base 3: mod_base = um
  modified_base 4: mod_base = gm
  modified_base 5: mod_base = OTHER; note = 2'O-methyl-adenosine
  modified_base 6: mod_base = OTHER; note = 2'O-methyl-adenosine
  modified_base 7: mod_base = um
  modified_base 8: mod_base = um
  modified_base 9: mod_base = OTHER; note = 2' Fluoro-guanosine
  modified_base 10: mod_base = OTHER; note = 2' Fluoro-cytidine
  modified_base 11: mod_base = OTHER; note = 2' Fluoro-cytidine
  modified_base 12: mod_base = um
  modified_base 13: mod_base = OTHER; note = 2'O-methyl-adenosine
  modified_base 14: mod_base = um
  modified_base 15: mod_base = gm
  modified_base 16: mod_base = um
  modified_base 17: mod_base = OTHER; note = 2'O-methyl-adenosine
  modified_base 18: mod_base = um
  modified_base 19: mod_base = um
  modified_base 20: mod_base = um
  modified_base 21: mod_base = um
  misc_feature 1^2: note = phosphorothioate linkage
  misc_feature 2^3: note = phosphorothioate linkage
  misc_feature 1: note = inverted abasic nucleoside
  misc_feature 2: note = inverted abasic nucleoside
cttgaatttcctatgtatttt

SEQ ID NO: 614 - RNA, 21 nt, synthetic construct
  source 1..21: mol_type = other RNA
  misc_feature 1..21: note = Description: B4GALT1 siRNA sense strands (modified); Sense strand ID: ETXS2423; Underlying Base Sequence: SEQ ID NO: 317
  modified_base 1: mod_base = cm
  modified_base 2: mod_base = um
  modified_base 3: mod_base = um
  modified_base 4: mod_base = um
  modified_base 5: mod_base = um
  modified_base 6: mod_base = cm
  modified_base 7: mod_base = OTHER; note = 2' Fluoro-cytidine
  modified_base 8: mod_base = OTHER; note = 2'O-methyl-adenosine
  modified_base 9: mod_base = OTHER; note = 2'Fluoro-adenosine
  modified_base 10: mod_base = OTHER; note = 2'Fluoro-adenosine
  modified_base 11: mod_base = OTHER; note = 2' Fluoro-guanosine
  modified_base 12: mod_base = OTHER; note = 2' Fluoro-guanosine
  modified_base 13: mod_base = gm
  modified_base 14: mod_base = cm
  modified_base 15: mod_base = cm
  modified_base 16: mod_base = um
  modified_base 17: mod_base = um
  modified_base 18: mod_base = OTHER; note = 2'O-methyl-adenosine
  modified_base 19: mod_base = OTHER; note = 2'O-methyl-adenosine
  modified_base 20: mod_base = OTHER; note = 2'O-methyl-adenosine
  modified_base 21: mod_base = OTHER; note = 2'O-methyl-adenosine
  misc_feature 1^2: note = phosphorothioate linkage
  misc_feature 2^3: note = phosphorothioate linkage
  misc_feature 1: note = inverted abasic nucleoside
  misc_feature 2: note = inverted abasic nucleoside
cttttccaaagtgccttaaaa

SEQ ID NO: 615 - RNA, 21 nt, synthetic construct
  source 1..21: mol_type = other RNA
  misc_feature 1..21: note = Description: B4GALT1 siRNA sense strands (modified); Sense strand ID: ETXS2425; Underlying Base Sequence: SEQ ID NO: 317
  modified_base 1: mod_base = cm
  modified_base 2: mod_base = um
  modified_base 3: mod_base = um
  modified_base 4: mod_base = um
  modified_base 5: mod_base = um
  modified_base 6: mod_base = cm
  modified_base 7: mod_base = cm
  modified_base 8: mod_base = OTHER; note = 2'O-methyl-adenosine
  modified_base 9: mod_base = OTHER; note = 2'Fluoro-adenosine
  modified_base 10: mod_base = OTHER; note = 2'Fluoro-adenosine
  modified_base 11: mod_base = OTHER; note = 2' Fluoro-guanosine
  modified_base 12: mod_base = um
  modified_base 13: mod_base = gm
  modified_base 14: mod_base = cm
  modified_base 15: mod_base = cm
  modified_base 16: mod_base = um
  modified_base 17: mod_base = um
  modified_base 18: mod_base = OTHER; note = 2'O-methyl-adenosine
  modified_base 19: mod_base = OTHER; note = 2'O-methyl-adenosine
  modified_base 20: mod_base = OTHER; note = 2'O-methyl-adenosine
  modified_base 21: mod_base = OTHER; note = 2'O-methyl-adenosine
  misc_feature 1^2: note = phosphorothioate linkage
  misc_feature 2^3: note = phosphorothioate linkage
  misc_feature 1: note = inverted abasic nucleoside
  misc_feature 2: note = inverted abasic nucleoside
cttttccaaagtgccttaaaa

SEQ ID NO: 616 - RNA, 21 nt, synthetic construct
  source 1..21: mol_type = other RNA
  misc_feature 1..21: note = Description: B4GALT1 siRNA sense strands (modified); Sense strand ID: ETXS2429; Underlying Base Sequence: SEQ ID NO: 328
  modified_base 1: mod_base = cm
  modified_base 2: mod_base = OTHER; note = 2'O-methyl-adenosine
  modified_base 3: mod_base = gm
  modified_base 4: mod_base = um
  modified_base 5: mod_base = OTHER; note = 2'O-methyl-adenosine
  modified_base 6: mod_base = um
  modified_base 7: mod_base = OTHER; note = 2' Fluoro-guanosine
  modified_base 8: mod_base = um
  modified_base 9: mod_base = OTHER; note = 2' Fluoro-guanosine
  modified_base 10: mod_base = OTHER; note = 2' Fluoro-guanosine
  modified_base 11: mod_base = OTHER; note = 2' Fluoro-guanosine
  modified_base 12: mod_base = OTHER; note = 2'Fluoro-adenosine
  modified_base 13: mod_base = gm
  modified_base 14: mod_base = gm
  modified_base 15: mod_base = um
  modified_base 16: mod_base = gm
  modified_base 17: mod_base = um
  modified_base 18: mod_base = cm
  modified_base 19: mod_base = um
  modified_base 20: mod_base = cm
  modified_base 21: mod_base = um
  misc_feature 1^2: note = phosphorothioate linkage
  misc_feature 2^3: note = phosphorothioate linkage
  misc_feature 1: note = inverted abasic nucleoside
  misc_feature 2: note = inverted abasic nucleoside
cagtattttggaggtgtctct

SEQ ID NO: 617 - RNA, 21 nt, synthetic construct
  source 1..21: mol_type = other RNA
  misc_feature 1..21: note = Description: B4GALT1 siRNA sense strands (modified); Sense strand ID: ETXS2431; Underlying Base Sequence: SEQ ID NO: 328
  modified_base 1: mod_base = cm
  modified_base 2: mod_base = OTHER; note = 2'O-methyl-adenosine
  modified_base 3: mod_base = gm
  modified_base 4: mod_base = um
  modified_base 5: mod_base = OTHER; note = 2'O-methyl-adenosine
  modified_base 6: mod_base = um
  modified_base 7: mod_base = um
  modified_base 8: mod_base = um
  modified_base 9: mod_base = OTHER; note = 2' Fluoro-guanosine
  modified_base 10: mod_base = OTHER; note = 2' Fluoro-guanosine
  modified_base 11: mod_base = OTHER; note = 2' Fluoro-guanosine
  modified_base 12: mod_base = OTHER; note = 2'O-methyl-adenosine
  modified_base 13: mod_base = gm
  modified_base 14: mod_base = gm
  modified_base 15: mod_base = um
  modified_base 16: mod_base = gm
  modified_base 17: mod_base = um
  modified_base 18: mod_base = cm
  modified_base 19: mod_base = um
  modified_base 20: mod_base = cm
  modified_base 21: mod_base = um
  misc_feature 1^2: note = phosphorothioate linkage
  misc_feature 2^3: note = phosphorothioate linkage
  misc_feature 1: note = inverted abasic nucleoside
  misc_feature 2: note = inverted abasic nucleoside
cagtattttggaggtgtctct

SEQ ID NO: 618 - RNA, 21 nt, synthetic construct
  source 1..21: mol_type = other RNA
  misc_feature 1..21: note = Description: B4GALT1 siRNA sense strands (modified); Sense strand ID: ETXS1037; Underlying Base Sequence: SEQ ID NO: 320
  modified_base 1: mod_base = OTHER; note = 2'O-methyl-adenosine
  modified_base 2: mod_base = OTHER; note = 2'O-methyl-adenosine
  modified_base 3: mod_base = cm
  modified_base 4: mod_base = um
  modified_base 5: mod_base = um
  modified_base 6: mod_base = gm
  modified_base 7: mod_base = OTHER; note = 2'Fluoro-adenosine
  modified_base 8: mod_base = OTHER; note = 2'O-methyl-adenosine
  modified_base 9: mod_base = OTHER; note = 2' Fluoro-guanosine
  modified_base 10: mod_base = OTHER; note = 2' Fluoro-guanosine
  modified_base 11: mod_base = OTHER; note = 2' Fluoro-guanosine
  modified_base 12: mod_base = cm
  modified_base 13: mod_base = cm
  modified_base 14: mod_base = um
  modified_base 15: mod_base = OTHER; note = 2'O-methyl-adenosine
  modified_base 16: mod_base = um
  modified_base 17: mod_base = gm
  modified_base 18: mod_base = um
  modified_base 19: mod_base = OTHER; note = 2'O-methyl-adenosine
  modified_base 20: mod_base = um
  modified_base 21: mod_base = um
  misc_feature 1^2: note = phosphorothioate linkage
  misc_feature 2^3: note = phosphorothioate linkage
aacttgaatttcctatgtatt

SEQ ID NO: 619 - RNA, 21 nt, synthetic construct
  source 1..21: mol_type = other RNA
  misc_feature 1..21: note = Description: B4GALT1 siRNA sense strands (modified); Sense strand ID: ETXS1039; Underlying Base Sequence: SEQ ID NO: 337
  modified_base 1: mod_base = um
  modified_base 2: mod_base = cm
  modified_base 3: mod_base = OTHER; note = 2'O-methyl-adenosine
  modified_base 4: mod_base = OTHER; note = 2'O-methyl-adenosine
  modified_base 5: mod_base = um
  modified_base 6: mod_base = gm
  modified_base 7: mod_base = OTHER; note = 2' Fluoro-guanosine
  modified_base 8: mod_base = OTHER; note = 2'O-methyl-adenosine
  modified_base 9: mod_base = OTHER; note = 2' Fluoro-guanosine
  modified_base 10: mod_base = OTHER; note = 2' Fluoro-guanosine
  modified_base 11: mod_base = OTHER; note = 2' Fluoro-guanosine
  modified_base 12: mod_base = cm
  modified_base 13: mod_base = cm
  modified_base 14: mod_base = um
  modified_base 15: mod_base = OTHER; note = 2'O-methyl-adenosine
  modified_base 16: mod_base = OTHER; note = 2'O-methyl-adenosine
  modified_base 17: mod_base = um
  modified_base 18: mod_base = OTHER; note = 2'O-methyl-adenosine
  modified_base 19: mod_base = OTHER; note = 2'O-methyl-adenosine
  modified_base 20: mod_base = um
  modified_base 21: mod_base = um
  misc_feature 1^2: note = phosphorothioate linkage
  misc_feature 2^3: note = phosphorothioate linkage
tcaatggatttcctaataatt

SEQ ID NO: 620 - RNA, 21 nt, synthetic construct
  source 1..21: mol_type = other RNA
  misc_feature 1..21: note = Description: B4GALT1 siRNA sense strands (modified); Sense strand ID: ETXS1041; Underlying Base Sequence: SEQ ID NO: 385
  modified_base 1: mod_base = gm
  modified_base 2: mod_base = um
  modified_base 3: mod_base = um
  modified_base 4: mod_base = cm
  modified_base 5: mod_base = OTHER; note = 2'O-methyl-adenosine
  modified_base 6: mod_base = gm
  modified_base 7: mod_base = OTHER; note = 2' Fluoro-guanosine
  modified_base 8: mod_base = OTHER; note = 2'O-methyl-adenosine
  modified_base 9: mod_base = OTHER; note = 2' Fluoro-guanosine
  modified_base 10: mod_base = OTHER; note = 2' Fluoro-guanosine
  modified_base 11: mod_base = OTHER; note = 2' Fluoro-guanosine
  modified_base 12: mod_base = um
  modified_base 13: mod_base = gm
  modified_base 14: mod_base = gm
  modified_base 15: mod_base = OTHER; note = 2'O-methyl-adenosine
  modified_base 16: mod_base = gm
  modified_base 17: mod_base = gm
  modified_base 18: mod_base = um
  modified_base 19: mod_base = gm
  modified_base 20: mod_base = um
  modified_base 21: mod_base = cm
  misc_feature 1^2: note = phosphorothioate linkage
  misc_feature 2^3: note = phosphorothioate linkage
gttcagtattttggaggtgtc

SEQ ID NO: 621 - RNA, 21 nt, synthetic construct
  source 1..21: mol_type = other RNA
  misc_feature 1..21: note = Description: B4GALT1 siRNA sense strands (modified); Sense strand ID: ETXS1043; Underlying Base Sequence: SEQ ID NO: 311
  modified_base 1: mod_base = OTHER; note = 2'O-methyl-adenosine
  modified_base 2: mod_base = OTHER; note = 2'O-methyl-adenosine
  modified_base 3: mod_base = um
  modified_base 4: mod_base = gm
  modified_base 5: mod_base = gm
  modified_base 6: mod_base = OTHER; note = 2'O-methyl-adenosine
  modified_base 7: mod_base = OTHER; note = 2' Fluoro-guanosine
  modified_base 8: mod_base = um
  modified_base 9: mod_base = OTHER; note = 2' Fluoro-guanosine
  modified_base 10: mod_base = OTHER; note = 2' Fluoro-cytidine
  modified_base 11: mod_base = OTHER; note = 2' Fluoro-cytidine
  modified_base 12: mod_base = um
  modified_base 13: mod_base = OTHER; note = 2'O-methyl-adenosine
  modified_base 14: mod_base = OTHER; note = 2'O-methyl-adenosine
  modified_base 15: mod_base = um
  modified_base 16: mod_base = OTHER; note = 2'O-methyl-adenosine
  modified_base 17: mod_base = OTHER; note = 2'O-methyl-adenosine
  modified_base 18: mod_base = um
  modified_base 19: mod_base = um
  modified_base 20: mod_base = OTHER; note = 2'O-methyl-adenosine
  modified_base 21: mod_base = um
  misc_feature 1^2: note = phosphorothioate linkage
  misc_feature 2^3: note = phosphorothioate linkage
aatggatttcctaataattat

SEQ ID NO: 622 - DNA, 21 bp, synthetic construct
  misc_feature 1..21: note = Description of sequence: Description: B4GALT1 siRNA antisense strands (unmodified)
  source 1..21: mol_type = other DNA
  modified_base 4: mod_base = OTHER; note = u
  modified_base 11: mod_base = OTHER; note = u
  modified_base 12: mod_base = OTHER; note = u
acgtgacacgttcggagaatt

SEQ ID NO: 623 - DNA, 21 bp, synthetic construct
  misc_feature 1..21: note = Description of sequence: Description: B4GALT1 siRNA sense strands (unmodified)
  source 1..21: mol_type = other DNA
  modified_base 1: mod_base = OTHER; note = u
  modified_base 2: mod_base = OTHER; note = u
  modified_base 4: mod_base = OTHER; note = u
  modified_base 12: mod_base = OTHER; note = u
  modified_base 14: mod_base = OTHER; note = u
  modified_base 19: mod_base = OTHER; note = u
ttctccgaacgtgtcacgttt

1. A method for treating diabetes, comprising administering to an individual an inhibitor of expression and/or function of B4GALT1, wherein the inhibitor is an siRNA oligomer.

2. A method for treating diabetes, comprising administering to an individual inhibitor of post-translational glycosylation, wherein the inhibitor is an siRNA oligomer.

3. The method of claim 1, wherein the is an siRNA oligomer is conjugated to one or more ligand moieties.

4. The method of claim 3, wherein the one or more ligand moieties comprise one or more GalNAc ligands or one or more GalNAc ligand derivatives.

5. The method of claim 1, wherein the inhibitor is an siRNA oligomer having a first and a second strand, and wherein:
i) the first strand of the siRNA has a length in the range of 15 to 30 nucleosides; and/or
ii) the second strand of the siRNA has a length in the range of 15 to 30 nucleosides.

6. The method of claim 5, wherein the second strand of the inhibitor comprises one or more abasic nucleoside in a terminal region of the second strand, and wherein the one or more abasic nucleoside is connected to an adjacent nucleoside through a reversed internucleoside linkage.

7. The method of claim 6, wherein the second strand of the inhibitor comprises:
i) two or more abasic nucleosides in a terminal region of the second strand;
ii) two or more abasic nucleosides in either the 5′ or 3′ terminal region of the second strand;
iii) two or more abasic nucleosides in either the 5′ or 3′ terminal region of the second strand, and wherein the abasic nucleosides are present in an overhang;
iv) two or more consecutive abasic nucleosides in a terminal region of the second strand, and wherein one abasic nucleoside is a terminal nucleoside;
v) two or more consecutive abasic nucleosides in either the 5′ or 3′ terminal region of the second strand, and wherein one abasic nucleoside is a terminal nucleoside in either the 5′ or 3′ terminal region of the second strand;
vi) a reversed internucleoside linkage that connects at least one abasic nucleoside to an adjacent basic nucleoside in a terminal region of the second strand;
vii) a reversed internucleoside linkage that connects at least one abasic nucleoside to an adjacent basic nucleoside in either the 5′ or 3′ terminal region of the second strand;
viii) an abasic nucleoside as the penultimate nucleoside which is connected via the reversed linkage to the nucleoside which is not the terminal nucleoside;
ix) abasic nucleosides as the 2 terminal nucleosides connected via a 5′-3′ linkage when reading the strand in the direction towards that terminus;
x) abasic nucleosides as the 2 terminal nucleosides connected via a 3′-5′ linkage when reading the strand in the direction towards the terminus comprising the terminal nucleosides;
xi) abasic nucleosides as the terminal 2 positions, wherein the penultimate nucleoside is connected via the reversed linkage to the antepenultimate nucleoside, and wherein the reversed linkage is a 5′-5′ reversed linkage or a 3′-3′ reversed linkage; and/or
xii) abasic nucleosides as the terminal 2 positions, wherein the penultimate nucleoside is connected via the reversed linkage to the antepenultimate nucleoside, and wherein:
(1) the reversed linkage is a 5′-5′ reversed linkage and the linkage between the terminal and penultimate abasic nucleosides is 3′-5′ when reading towards the terminus comprising the terminal and penultimate abasic nucleosides; or
(2) the reversed linkage is a 3′-3′ reversed linkage and the linkage between the terminal and penultimate abasic nucleosides is 5′-3′ when reading towards the terminus comprising the terminal and penultimate abasic nucleosides.

8. The method of claim 7, wherein the reversed internucleoside linkage is at a terminal region which is distal to the 5′ terminal region of the second strand, or at a terminal region which is distal to the 3′ terminal region of the second strand.

9. The method of claim 7, wherein the reversed internucleoside linkage is a 3′-3′ reversed linkage or a 5′-5′ reversed linkage.

10. The method of claim 1, wherein one or more nucleosides on the first strand or the second strand of the nucleic acid are modified.

11. The method of claim 10, wherein the modification is a modification at the 2′-OH group of the ribose sugar.

12. The method of claim 11, wherein the modification is a 2′-Me or a 2′-F modification.

13. The method of claim 10, wherein the first strand of the nucleic acid comprises a 2′-F at any of position 14, position 2, position 6, or any combination thereof, counting from position 1 of the first strand of the nucleic acid.

14. The method of claim 10, wherein the second strand of the nucleic acid comprises a 2′-F modification at position 7, 9, 11, and/or 13, counting from position 1 of said second strand of the nucleic acid.

15. The method of claim 10, wherein the first and second strand of the nucleic acid each individually comprise 2′-Me and 2′-F modifications.

16. The method of claim 10, wherein the siRNA oligomer comprises at least one thermally destabilizing modification at one or more of positions 1 to 9 of the first strand counting from position 1 of the first strand, or at one or more of positions on the second strand aligned with positions 1 to 9 of the first strand, and wherein the destabilizing modification is selected from a modified unlocked nucleic acid (UNA) and a glycol nucleic acid (GNA).

17. The method of claim 16, wherein the siRNA oligomer comprises at least one thermally destabilizing modification at position 7 of the first strand, counting from position 1 of the first strand.

18. The method of claim 10, wherein the siRNA oligomer comprises 3 or more 2′-F modifications at positions 7 to 13 of the second strand.

19. The method of claim 18, wherein the siRNA oligomer comprises 4, 5, 6, or 7 2′-F modifications at positions 7 to 13 of the second strand, counting from position 1 of the second strand.

20. The method of claim 1, wherein the inhibitor is in a pharmaceutical composition comprising the inhibitor and a pharmaceutically acceptable excipient or carrier.
